United States Patent Application Publication US 2015/0125456 A1 - sequence listing, part 2

SEQ ID NO: 2121 - DNA, 8976 bp, Homo sapiens
agcccaaaccgcggccctagccccggccgcacccccagcccgcgccagcatgatgaacaacagcggctactcagacgccggcctcggcctgggcgatgagacagacgagatgccgtccacggagaaggacctggcggaggacgcgccgtggaagaagatccagcagaacacattcacgcgctggtgcaatgagcacctcaagtgcgtgggcaagcgcctgaccgacctgcagcgcgacctcagcgacgggctccggctcatcgcgctgctcgaggtgctcagccagaagcgcatgtaccgcaagttccatccgcgccccaacttccgccaaatgaagctggagaacgtgtccgtggccctcgagttcctcgagcgcgagcacatcaagctcgtgtccatagacagcaaggccatcgtggatgggaacctgaagctgatcctgggcctgatctggacgctgatcctgcactactccatctccatgcccatgtgggaggatgaagatgatgaggatgcccgcaaacagacgcccaagcagcggctgcttggctggatccagaacaaggtgccccagctgcccatcaccaacttcaaccgtgactggcaggacggcaaagctctgggcgccctggtggacaactgcgcccccggtctctgccccgactgggaggcctgggaccccaaccagcccgtggagaacgcccgggaggccatgcagcaggccgacgactggcttggggtgccccaggtcattgcccctgaggagattgtggaccccaacgtggatgagcattctgttatgacctacctgtcccagttccccaaggccaagctcaaacctggtgcccctgttcgatccaagcagctgaaccccaagaaagccatcgcctatgggcctggcatcgagccacagggcaacaccgtgctgcagcctgcccacttcaccgtgcagacggtggacgcgggcgtgggcgaggtgctggtctacatcgaggaccctgaaggccacaccgaggaggctaaggtggttcccaacaatgacaaggatcgcacctatgctgtctcctatgtgcccaaggtcgctgggttacacaaggtgaccgtgctctttgctggccagaacattgaacgcagtccctttgaggtgaacgtgggcatggccctgggagatgccaacaaggtgtcagcccgtggccctggcctggaacctgtgggcaatgtggccaacaaacccacctactttgacatctacactgcgggggccggcactggcgatgttgctgtggtgatcgtggacccacagggccggcgggacacagtggaggtggccctggaggacaagggtgacagcacgttccgctgcacatacagacctgccatggaggggccacataccgtgcatgtggcctttgcgggtgcccccatcacccgcagtcccttccctgtccatgtgtcggaagcctgtaaccccaacgcctgccgcgcctctgggcgaggcctgcagcccaagggtgttcgcgtgaaagaggtggctgacttcaaggtgtttaccaagggtgccggcagcggggagctcaaggtcacggtcaaggggccaaagggcacagaggagccagtgaaggtgcgggaggctggggatggtgtgttcgagtgcgagtactacccggtggtgcctgggaagtatgtggtgaccatcacgtggggcggctacgccatccctcgcagcccctttgaggtacaggtgagcccagaggcaggagtgcaaaaggtccgggcctggggtcctggtttggagactggccaggtgggcaagtcagccgattttgtggtggaagccattggcaccgaggtggggacactgggcttctccatcgaggggccctcacaagccaagatcgaatgtgacgacaagggggatggctcctgcgatgtgcggtactggcccacggagcctggggagtacgctgtgcacgtcatctgtgacgatgaggacatccgagactcacccttcattgcccacatcctgcccgccccacctgactgcttcccagataaggtgaaggcctttgggcctggcctggagcctaccggctgcatcgtggacaagcccgctgagttcaccattgatgctcgtgcagctggcaagggagacctgaagctctatgcccaggacgccgacggctgtcccatcgacatcaaggtgatccccaacggcgacggcaccttccgctgctcctacgtgcccaccaagcccattaagcacaccatcatcatctcctggggaggcgtaaacgtgcccaagagccccttccgggtgaacgtgggcgagggcagccaccccgagcgggtaaaggtgtacggccccggagtggagaagacaggcctcaaggccaatgagcccacctacttcacggtggactgcagcgaggcggggcaaggcgacgtgagcatcggcatcaagtgcgccccaggcgtggtgggccctgcagaggctgacattgacttcgacatcatcaagaatgacaacgacaccttcaccgtcaagtacacgccaccaggggcgggccgctacaccatcatggtgctgtttgccaaccaggagatccccgccagccccttccacatcaaggtggacccatcccacgatgccagcaaagtcaaggccgagggccctgggctgaatcgcacaggtgtggaagtcgggaagcccacccacttcacggtgctgaccaagggagccggcaaggccaagctggatgtgcagtttgcagggacagccaagggcgaggttgtgcgggactttgagatcatagacaaccatgactactcctacactgtcaagtacaccgctgtccagcagggcaacatggcagtgacagtgacttatggcggggaccctgtccccaagagcccctttgtggtgaatgtggcacccccgctggacctcagcaaaatcaaagttcagggccttaatagcaaggtggctgtgggacaggaacaagcattctctgtgaacacacgaggggctggcggtcagggccaactggatgtgcggatgacttcgccctctcgccggcccatcccctgcaagctggagccaggcggtggagcggaagcccaggctgtgcgctacatgcccccggaggaggggccctacaaggtggatatcacctacgatggtcacccggtgcctggcagcccgtttgctgtggagggtgtcctgccccctgatccctccaaggtctgtgcttatggcccgggtctcaagggtggactggtaggcacccccgcgccattctccatcgacaccaagggggctggcacaggtggcctggggctgaccgtagagggcccctgcgaggccaagatcgagtgccaggacaatggtgatggctcatgtgctgtcagctacctgcccacggagcctggcgagtacaccatcaacatcctgtttgctgaggcccacatccctggctcgcccttcaaagccaccattcggcctgtgtttgacccgagcaaggtgcgggccagtggaccgggcctggagcgcggcaaggtcggtgaggcagccaccttcactgtggactgctcagaggcaggcgaggcggagctgaccattgagatcctgtcggatgccggggtcaaggccgaggtgctgatccacaacaacgcggatggcacctaccacatcacctacagccctgccttccctggcacctacaccattaccatcaagtatggcgggcatcccgtgcccaaattccccacccgtgtccatgtgcagcctgcggtcgataccagtggcgtcaaggtctcagggcctggtgttgagccacacggtgtcctgcgggaggtgaccactgagttcactgtggatgcaagatccctaacagccacaggcggcaaccacgtgacggctcgtgtgctcaacccctcgggggccaagacagacacctatgtgacagacaatggggacggcacctaccgagtgcagtacaccgcctacgaggagggcgtgcatctggtggaggtcctgtatgatgaggtcgctgtgcccaagagccccttccgagtgggcgtgaccgagggctgtgatcccacccgcgtccgagccttcgggccaggcctggagggtggcttggtcaacaaggccaaccgattcactgtggagaccaggggagcgggcaccgggggccttggcctagccatcgagggtccctcggaagccaagatgtcctgcaaggacaacaaggatggtagctgcaccgtggagtacatccccttcactcctggagactatgacgtcaacatcaccttcggggggcggcccatcccagggagcccgttccgcgtgccagtgaaggatgtggtggaccctgggaaggtgaagtgctcagggccagggctgggggctggtgtcagggcccgggttcctcagaccttcacagtggactgcagtcaagctggccgggcgcccctgcaggtggctgtgctgggccccacaggtgtggccgagcctgtggaggtgcgggacaatggagatggcacccacactgtccactacaccccagccactgacgggccctacacggtagccgtcaagtatgctgaccaggaggtgccacgcagccccttcaagatcaaggtcctcccagctcatgatgccagcaaggtgcgggccagcggcccaggcctcaacgcctctggcatccctgccagcctgcctgtggagttcaccatcgacgcacgggacgcgggcgaggggttgctcactgtccagatcttggaccccgagggtaagcccaagaaggccaacatccgggacaatggggatggcacgtacactgtgtcctacctgccggacatgagtggccggtacaccatcaccatcaagtatggcggtgatgagatcccctactcgcccttccgcatccatgctctgcccactggggatgccagcaagtgcctcgtcacagtgtccattggaggccatggcctgggtgcctgcctgggccctcgaatccagattgggcaggagacggtgatcacggtggatgccaaggcagccggtgaggggaaggtgacatgcacggtgtccacgccggatggggcagagctcgatgtggatgtggttgagaaccatgacggtacctttgacatctactacacagcgcccgagccgggcaagtacgtcatcaccatccgcttcgggggtgagcacatccccaacagccccttccacgtgctggcgtgtgaccccctgccgcacgaggaggagccctctgaagtgccacagctgcgccagccctacgctcctccccggcccggcgcccgccccacacactgggccacagaggagccagtggtgcctgtggagccaatggagtccatgctgaggcccttcaacctggtcatccccttcgcggtgcagaaaggggagctcacaggagaggtgcggatgccctcggggaagacggcacggcccaacatcaccgacaacaaggacggcaccatcacggtgaggtatgcacccactgagaaaggcctgcaccagatggggatcaagtatgacggcaaccacatccctgggagccccttacagttctatgtggatgccatcaacagccgccatgtcagtgcctatgggccaggcctgagccatggcatggtcaacaagccagccaccttcactattgtcaccaaagatgctggagaagggggtctgtcactggccgtggagggcccatccaaggcagagatcacctgtaaggacaacaaggatggcacctgcaccgtgtcctatctgccgactgcgcctggagactacagcatcatcgtgcgcttcgatgacaagcacatcccggggagccccttcacagccaagatcacaggtgatgactccatgaggacctcacagctgaatgtgggcacctccacggacgtgtcactgaagatcaccgagagtgatctgagccagctgaccgccagcatccgtgccccctcgggcaacgaggagccctgcctgctgaagcgcctgcccaaccggcacattgggatctccttcacccccaaggaggtcggggagcacgtggtgagcgtgcgcaagagtggcaagcatgtcaccaacagccccttcaagatcctggtggggccatctgagatcggggacgccagcaaggtgcgggtctggggcaaggggctttccgagggacacacattccaggtggcagagttcatcgtggacactcgcaatgcaggttatgggggcttggggctgagtattgaaggcccaagcaaggtggacatcaactgtgaggacatggaggacgggacatgcaaagtcacctactgccccaccgagcccggcacctacatcatcaacatcaagtttgctgacaagcacgtgcctggaagccccttcactgtgaaggtgaccggcgagggccgcatgaaggagagcatcacccggcggagacaggcaccttccatcgccaccatcggcagcacctgtgacctcaacctcaagatcccaggaaactggttccagatggtgtctgcccaggagcgcctgacacgcaccttcacacgcagcagccacacctacacccgcacggagcgcacggagatcagcaagacgcggggcggggagacaaagcgcgaggtgcgggtggaggagtccacccaggtcggcggggaccccttccctgctgtgtttggggacttcctgggccgggagcgcctgggatccttcggcagcatcacccggcagcaggagggtgaggccagctctcaggacatgactgcacaggtgaccagcccatcgggcaaggtggaagccgcagagatcgtcgagggcgaggacagcgcctacagcgtgcgctttgtgccccaggaaatggggccccatacggtcgctgtcaagtaccgtggccagcacgtgcccggcagcccctttcagttcactgtggggccgctgggtgaaggtggtgcccacaaggtgcgggccggaggcacagggctggagcgaggtgtggccggcgtgccagccgagttcagcatctggacccgggaggctggcgctgggggcctgtccattgctgtggagggtcctagcaaagcggagattgcatttgaggatcgcaaagatggctcctgcggcgtctcctatgtcgtccaggaaccaggtgactatgaggtctccatcaagttcaatgatgagcacatcccagacagcccctttgtggtgcctgtggcctccctctcggatgacgctcgccgtctcactgtcaccagcctccaggagacggggctcaaggtgaaccagccagcgtcctttgccgtgcagctgaacggtgcccggggcgtgattgatgcccgggtgcacacaccctcgggggctgtggaggagtgctacgtctctgagctggacagtgacaagcacaccatccgcttcatcccccacgagaatggcgtccactccatcgatgtcaagttcaacggtgcccacatccctggaagtcccttcaagatccgcgttggggagcagagccaggctggggacccaggcttggtgtcagcctacggtcctgggctcgagggaggcactaccggtgtgtcatcagagttcatcgtgaacaccctgaatgccggctcgggggccttgtctgtcaccattgatggcccctccaaggtgcagctggactgtcgggagtgtcctgagggccatgtggtcacttatactcccatggcccctggcaactacctcattgccatcaagtacggtggcccccagcacatcgtgggcagccccttcaaggccaaggtcactggtccgaggctgtccggaggccacagccttcacgaaacatccacggttctggtggagactgtgaccaagtcctcctcaagccggggctccagctacagctccatccccaagttctcctcagatgccagcaaggtggtgactcggggccctgggctgtcccaggccttcgtgggccagaagaactccttcaccgtggactgcagcaaagcaggcaccaacatgatgatggtgggcgtgcacggccccaagaccccctgtgaggaggtgtacgtgaagcacatggggaaccgggtgtacaatgtcacctacactgtcaaggagaaaggggactacatcctcattgtcaagtggggtgacgaaagtgtccctggaagccccttcaaagtcaaggtcccttgaatcccaaaagtgcctccccagcctcagcccccacctccagccacacacacattacacacacacacacacacacacaaatgtgccacacccagacacgcacagaatcagacactacaaacacctgccttgggggtgaagtgaaggcccagcctccccaccccaccgcgccccaggggttggaggaccttgtctgtgtcaggacagtgtccctccctgggaatgtgacatgagggccgactggggccaggctcaggggcagaggctgggacacaaggggctggcgagggctgcgaggccagggaagccctgagtttctggcggggctgagcagtgggggagcattgtgttgtgggtgtctgtgtgtgaggtcaccctcaaactgcaccgccggccagataccctcctgaccccgaggacttggtctggtctctctggtggctacaaccccagagttttaaggacttggaaaggaaagcacaatcagagaagaaaacagcccccgaaccagcaggagtggcctggcacatggaccggcctgagcgatgtgcactccacccaagccaggctcccagggggcctgatttctctctcactgtctctttttttaaaatggttgcacggctctgccccatggggggccttttttacacactgcgaggcccagctttctaggggacttttgcacatgtcatgcagctcagctgggagctgcttaggtggaaaactccaaataaagtgcggctgtcgca

SEQ ID NO: 2122 - DNA, 8976 bp, Homo sapiens; identical to SEQ ID NO: 2121

SEQ ID NO: 2123 - DNA, 8206 bp, Homo sapiens; identical to SEQ ID NO: 1902

SEQ ID NO: 2124 - DNA, 8976 bp, Homo sapiens; identical to SEQ ID NO: 2121

SEQ ID NO: 2125 - DNA, 9448 bp, Homo sapiens
gcgatccgggcgccaccccgcggtcatcggtcaccggtcgctctcaggaacagcagcgcaacctctgctccctgcctcgcctcccgcgcgcctaggtgcctgcgactttaattaaagggccgtcccctcgccgaggctgcagcaccgcccccccggcttctcgcgcctcaaaatgagtagctcccactctcgggcgggccagagcgcagcaggcgcggctccgggcggcggcgtcgacacgcgggacgccgagatgccggccaccgagaaggacctggcggaggacgcgccgtggaagaagatccagcagaacactttcacgcgctggtgcaacgagcacctgaagtgcgtgagcaagcgcatcgccaacctgcagacggacctgagcgacgggctgcggcttatcgcgctgttggaggtgctcagccagaagaagatgcaccgcaagcacaaccagcggcccactttccgccaaatgcagcttgagaacgtgtcggtggcgctcgagttcctggaccgcgagagcatcaaactggtgtccatcgacagcaaggccatcgtggacgggaacctgaagctgatcctgggcctcatctggaccctgatcctgcactactccatctccatgcccatgtgggacgaggaggaggatgaggaggccaagaagcagacccccaagcagaggctcctgggctggatccagaacaagctgccgcagctgcccatcaccaacttcagccgggactggcagagcggccgggccctgggcgccctggtggacagctgtgccccgggcctgtgtcctgactgggactcttgggacgccagcaagcccgttaccaatgcgcgagaggccatgcagcaggcggatgactggctgggcatcccccaggtgatcacccccgaggagattgtggaccccaacgtggacgagcactctgtcatgacctacctgtcccagttccccaaggccaagctgaagccaggggctcccttgcggcccaaactgaacccgaagaaagcccgtgcctacgggccaggcatcgagcccacaggcaacatggtgaagaagcgggcagagttcactgtggagaccagaagtgctggccagggagaggtgctggtgtacgtggaggacccggccggacaccaggaggaggcaaaagtgaccgccaataacgacaagaaccgcaccttctccgtctggtacgtccccgaggtgacggggactcataaggttactgtgctctttgctggccagcacatcgccaagagccccttcgaggtgtacgtggataagtcacagggtgacgccagcaaagtgacagcccaaggtcccggcctggagcccagtggcaacatcgccaacaagaccacctactttgagatctttacggcaggagctggcacgggcgaggtcgaggttgtgatccaggaccccatgggacagaagggcacggtagagcctcagctggaggcccggggcgacagcacataccgctgcagctaccagcccaccatggagggcgtccacaccgtgcacgtcacgtttgccggcgtgcccatccctcgcagcccctacactgtcactgttggccaagcctgtaacccgagtgcctgccgggcggttggccggggcctccagcccaagggtgtgcgggtgaaggagacagctgacttcaaggtgtacacaaagggcgctggcagtggggagctgaaggtcaccgtgaagggccccaagggagaggagcgcgtgaagcagaaggacctgggggatggcgtgtatggcttcgagtattaccccatggtccctggaacctatatcgtcaccatcacgtggggtggtcagaacatcgggcgcagtcccttcgaagtgaaggtgggcaccgagtgtggcaatcagaaggtacgggcctggggccctgggctggagggcggcgtcgttggcaagtcagcagactttgtggtggaggctatcggggacgacgtgggcacgctgggcttctcggtggaagggccatcgcaggctaagatcgaatgtgacgacaagggcgacggctcctgtgatgtgcgctactggccgcaggaggctggcgagtatgccgttcacgtgctgtgcaacagcgaagacatccgcctcagccccttcatggctgacatccgtgacgcgccccaggacttccacccagacagggtgaaggcacgtgggcctggattggagaagacaggtgtggccgtcaacaagccagcagagttcacagtggatgccaagcacggtggcaaggccccacttcgggtccaagtccaggacaatgaaggctgccctgtggaggcgttggtcaaggacaacggcaatggcacttacagctgctcctacgtgcccaggaagccggtgaagcacacagccatggtgtcctggggaggcgtcagcatccccaacagccccttcagggtgaatgtgggagctggcagccaccccaacaaggtcaaagtatacggccccggagtagccaagacagggctcaaggcccacgagcccacctacttcactgtggactgcgccgaggctggccagggggacgtcagcatcggcatcaagtgtgcccctggagtggtaggccccgccgaagctgacatcgacttcgacatcatccgcaatgacaatgacaccttcacggtcaagtacacgccccggggggctggcagctacaccattatggtcctctttgctgaccaggccacgcccaccagccccatccgagtcaaggtggagccctctcatgacgccagtaaggtgaaggccgagggccctggcctcagtcgcactggtgtcgagcttggcaagcccacccacttcacagtaaatgccaaagctgctggcaaaggcaagctggacgtccagttctcaggactcaccaagggggatgcagtgcgagatgtggacatcatcgaccaccatgacaacacctacacagtcaagtacacgcctgtccagcagggtccagtaggcgtcaatgtcacttatggaggggatcccatccctaagagccctttctcagtggcagtatctccaagcctggacctcagcaagatcaaggtgtctggcctgggagagaaggtggacgttggcaaagaccaggagttcacagtcaaatcaaagggtgctggtggtcaaggcaaagtggcatccaagattgtgggcccctcgggtgcagcggtgccctgcaaggtggagccaggcctgggggctgacaacagtgtggtgcgcttcctgccccgtgaggaagggccctatgaggtggaggtgacctatgacggcgtgcccgtgcctggcagcccctttcctctggaagctgtggcccccaccaagcctagcaaggtgaaggcgtttgggccggggctgcagggaggcagtgcgggctcccccgcccgcttcaccatcgacaccaagggcgccggcacaggtggcctgggcctgacggtggagggcccctgtgaggcgcagctcgagtgcttggacaatggggatggcacatgttccgtgtcctacgtgcccaccgagcccggggactacaacatcaacatcctcttcgctgacacccacatccctggctccccattcaaggcccacgtggttccctgctttgacgcatccaaagtcaagtgctcaggccccgggctggagcgggccaccgctggggaggtgggccaattccaagtggactgctcgagcgcgggcagcgcggagctgaccattgagatctgctcggaggcggggcttccggccgaggtgtacatccaggaccacggtgatggcacgcacaccattacctacattcccctctgccccggggcctacaccgtcaccatcaagtacggcggccagcccgtgcccaacttccccagcaagctgcaggtggaacctgcggtggacacttccggtgtccagtgctatgggcctggtattgagggccagggtgtcttccgtgaggccaccactgagttcagtgtggacgcccgggctctgacacagaccggagggccgcacgtcaaggcccgtgtggccaacccctcaggcaacctgacggagacctacgttcaggaccgtggcgatggcatgtacaaagtggagtacacgccttacgaggagggactgcactccgtggacgtgacctatgacggcagtcccgtgcccagcagccccttccaggtgcccgtgaccgagggctgcgacccctcccgggtgcgtgtccacgggccaggcatccaaagtggcaccaccaacaagcccaacaagttcactgtggagaccaggggagctggcacgggcggcctgggcctggctgtagagggcccctccgaggccaagatgtcctgcatggataacaaggacggcagctgctcggtcgagtacatcccttatgaggctggcacctacagcctcaacgtcacctatggtggccatcaagtgccaggcagtcctttcaaggtccctgtgcatgatgtgacagatgcgtccaaggtcaagtgctctgggcccggcctgagcccaggcatggttcgtgccaacctccctcagtccttccaggtggacacaagcaaggctggtgtggccccattgcaggtcaaagtgcaagggcccaaaggcctggtggagccagtggacgtggtagacaacgctgatggcacccagaccgtcaattatgtgcccagccgagaagggccctacagcatctcagtactgtatggagatgaagaggtaccccggagccccttcaaggtcaaggtgctgcctactcatgatgccagcaaggtgaaggccagtggccccgggctcaacaccactggcgtgcctgccagcctgcccgtggagttcaccatcgatgcaaaggacgccggggagggcctgctggctgtccagatcacggatcccgaaggcaagccgaagaagacacacatccaagacaaccatgacggcacgtatacagtggcctacgtgccagacgtgacaggtcgctacaccatcctcatcaagtacggtggtgacgagatccccttctccccgtaccgcgtgcgtgccgtgcccaccggggacgccagcaagtgcactgtcacagtgtcaatcggaggtcacgggctaggtgctggcatcggccccaccattcagattggggaggagacggtgatcactgtggacactaaggcggcaggcaaaggcaaagtgacgtgcaccgtgtgcacgcctgatggctcagaggtggatgtggacgtggtggagaatgaggacggcactttcgacatcttctacacggccccccagccgggcaaatacgtcatctgtgtgcgctttggtggcgagcacgtgcccaacagccccttccaagtgacggctctggctggggaccagccctcggtgcagccccctctacggtctcagcagctggccccacagtacacctacgcccagggcggccagcagacttgggccccggagaggcccctggtgggtgtcaatgggctggatgtgaccagcctgaggccctttgaccttgtcatccccttcaccatcaagaagggcgagatcacaggggaggttcggatgccctcaggcaaggtggcgcagcccaccatcactgacaacaaagacggcaccgtgaccgtgcggtatgcacccagcgaggctggcctgcacgagatggacatccgctatgacaacatgcacatcccaggaagccccttgcagttctatgtggattacgtcaactgtggccatgtcactgcctatgggcctggcctcacccatggagtagtgaacaagcctgccaccttcaccgtcaacaccaaggatgcaggagaggggggcctgtctctggccattgagggcccgtccaaagcagaaatcagctgcactgacaaccaggatgggacatgcagcgtgtcctacctgcctgtgctgccgggggactacagcattctagtcaagtacaatgaacagcacgtcccaggcagccccttcactgctcgggtcacaggtgacgactccatgcgtatgtcccacctaaaggtcggctctgctgccgacatccccatcaacatctcagagacggatctcagcctgctgacggccactgtggtcccgccctcgggccgggaggagccctgtttgctgaagcggctgcgtaatggccacgtggggatttcattcgtgcccaaggagacgggggagcacctggtgcatgtgaagaaaaatggccagcacgtggccagcagccccatcccggtggtgatcagccagtcggaaattggggatgccagtcgtgttcgggtctctggtcagggccttcacgaaggccacacctttgagcctgcagagtttatcattgatacccgcgatgcaggctatggtgggctcagcctgtccattgagggccccagcaaggtggacatcaacacagaggacctggaggacgggacgtgcagggtcacctactgccccacagagccaggcaactacatcatcaacatcaagtttgccgaccagcacgtgcctggcagccccttctctgtgaaggtgacaggcgagggccgggtgaaagagagcatcacccgcaggcgtcgggctccttcagtggccaacgttggtagtcattgtgacctcagcctgaaaatccctgaaattagcatccaggatatgacagcccaggtgaccagcccatcgggcaagacccatgaggccgagatcgtggaaggggagaaccacacctactgcatccgctttgttcccgctgagatgggcacacacacagtcagcgtgaagtacaagggccagcacgtgcctgggagccccttccagttcaccgtggggcccctaggggaagggggagcccacaaggtccgagctgggggccctggcctggagagagctgaagctggagtgccagccgaattcagtatctggacccgggaagctggtgctggaggcctggccattgctgtcgagggccccagcaaggctgagatctcttttgaggaccgcaaggacggctcctgtggtgtggcttatgtggtccaggagccaggtgactacgaagtctcagtcaagttcaacgaggaacacattcccgacagccccttcgtggtgcctgtggcttctccgtctggcgacgcccgccgcctcactgtttctagccttcaggtgaggcaccgagagaaaccgcccacctggggctcctgggcccggacagaccagagccaccgcagagaccaggccttggccctgtgttcagtgacccccctggcccagctctgggttccaggcctctgctctggccgggtgcagcccacgcttggggtcggcaggaaatatcctgcccaccacgtggagtttttctcgtgtctcaggtctaaaggctttgaacagaagcctgtgccccttgagcaccagggctgcggtttaaagagggacagcctgccaaggctgggtgctgcccacagggtggggcagccctcccttcctgccacctgggtgtgtgcgacggcagagtgtgggggcaggggcggggatgtgcgcctgtggcttgctgccccttgcaaatcagtggctctccctctttaaaccaagttggacgccagatgggtaagtgcgacccgcgggcctcttgctcctggggcctttccgtcctcccttgccctggctcaagcacccccatctaaccatgtctgctgtgcttccaggagtcagggctaaaggtcaaccagccagcctcttttgcagtcagcctgaacggggccaagggggcgatcgatgccaaggtgcacagcccctcaggagccctggaggagtgctatgtcacagaaattgaccaaggtgaggccctgtccctgcccggccgccctgccctgctggctggaagcaggctgagagtacaaaaggaaggtaccgcttctgtaagcagccaagacggggccccaactcctgggccccctaagccaggcaaccctttcccaattggtgacccaagccgctggggatgtggctcgccacccacagctattaggaaggccttctaccctgcagtaccatgccatctccacagggaaagactcaaagtccagcctcagtgctgcccggcccttcagccacggccatggtacttgtgcacaggcctggggcagccttgtgggtaggaggagcccagtgggcttcatttcacggcctagtcctgcccttcccagctgcatgacctgaagcaagttcctgcccgtctctgagcctgttaacatgcaggggatatggtgttcacggtaacctttcttaggaggcagcaaggcctgggtttggcttgtaaaagatttccgtcccaatgcaccctgacggtgggcagcttgagtgtctaaaccttcggccctcaggaggtctgctgcggggtgcaggtgcccagcgtggctgggctcacactgatggaccggcaaaatggggagggccagggttgaggctgttcctcacagacaccatctgctggtttgaggaggggccccaggcccacagcatgactccctgctcctcagataagtatgctgtgcgcttcatccctcgggagaatggcgtttacctgattgacgtcaagttcaacggcacccacatccctggaagccccttcaagatccgagttggggagcctgggcatggaggggacccaggcttggtgtctgcttacggagcaggtctggaaggcggtgtcacagggaacccagctgagttcgtcgtgaacacgagcaatgcgggagctggtgccctgtcggtgaccattgacggcccctccaaggtgaagatggattgccaggagtgccctgagggctaccgcgtcacctatacccccatggcacctggcagctacctcatctccatcaagtacggcggcccctaccacattgggggcagccccttcaaggccaaagtcacaggcccccgtctcgtcagcaaccacagcctccacgagacatcatcagtgtttgtagactctctgaccaaggccacctgtgccccccagcatggggccccgggtcctgggcctgctgacgccagcaaggtggtggccaagggcctggggctgagcaaggcctacgtaggccagaagagcagcttcacagtagactgcagcaaagcaggcaacaacatgctgctggtgggggttcatggcccaaggaccccctgcgaggagatcctggtgaagcacgtgggcagccggctctacagcgtgtcctacctgcgctcacctgcctccccagccagccgctgacctctcggctttcacttgggcagagggagccatttggtggcgctgcttgtcttctttggttctgggaggggtgagggatgggggtcctgtacacaaccacccactagttctcttctccagccaagaggaataaagttttgcttccattc

SEQ ID NO: 2126 - DNA, 2949 bp, Homo sapiens
cagtcggggcccggaagtggtccctgtagaaccactgtggcaccgctactccgtgccgcgcccgtcgagcattgcgttgctgcattgcgccccaccgactccactatgttgaagaaattcgacaagaaggatgaggagtcaggtggaggctccaacccattccagcaccttgagaagagtgcggtactccaggaggcaagcccgtgtatttaatgaaactcccatcaaccctcggaaatgtgcccacatcctcaccaagattctttatctcataaaccagggggagcacctggggaccacggaagcgaccgaggccttctttgccatgaccaagctctttcagtccaatgatcctaacaaaagacatgactgggaaagaagacaactaccggggcccggccgtgcgagccctctgccagatcactgatagcaccatgctgcaggctattgagcgctacatgaaacaagccattgtggacaaggtgcccagtgtctccagctctgccctcgtgtcttccttgcacctgctgaagtgcagctttgacgtggtcaagcgctgggtgaatgaggctcaggaggcagcatccagtgataacatcatggtccagtaccacgcactagggctcctgtaccatgtgcgtaagaatgaccgcctagccgtcaataagatgatcagcaaggtcacacggcatggccttaagtctccctttgcctactgcatgatgatccgggtggccagcaagcagctggaagaggaggatggcagccgtgacagcccactgtttgacttcatcgagagctgcttgcgcaacaagcacgagatggtggtgtatgaagccgcctcggccatcgtcaatctgccaggctgcagtgccaaagagctggccccggctgtgtcagtgctccagcttttctgcagctcacccaaggctgctctccgctatgctgctgttcgtaccctcaataaggttgccatgaagcatccgtcagctgtgacagcttgtaatctggatctggagaacctggtcacagattcaaaccgcagcattgccacgctggccatcaccaccctccttaagacgggcagcgagagcagcatcgaccgcctcatgaagcagatctcctccttcatgtcagaaatctcggatgaattcaaggtggtggttgtccaggccatcagtgccctgtgtcagaaatatcctcgcaaacacgccgtccttatgaacttcctgttcaccatgctgcgggaagagggtggctttgagtataagcgcgctatcgtggactgcatcatcagcatcattgaagagaactcagagagcaaggagacagggctgtcacatctgtgcgagttcatcgaggactgcgagttcacagtgctggccacccgtattctacatctcctgggccaggaggggcccaagaccaccaatccctcaaagtacatccgcttcatctataaccgagtggtcttggagcatgaggaggtccgggcaggtgctgtgagtgctctggcgaagtttggagcccagaatgaagagatgttacccagtatcttggtgttgctgaagaggtgtgtgatggatgatgacaatgaagtaagggaccgagccaccttctacctaaatgtcctggagcagaagcagaaggcccttaatgcaggctatatcctaaatggtctgactgtgtccatccctggtctggagagggctctgcagcagtacactctagaaccatcagaaaaaccttttgacctcaagtctgtgcccctggccacggcgcccatggcagagcagagaacagaaagtacccccatcacagcagtcaaacagcctgagaaagtggcagctaccaggcaggagatcttccaggagcagttggcagcagtgccagagttccgcggtcttgggcccctcttcaagtcctcgcctgagcccgtggccctcaccgagtcagagacggagtatgtcatccgctgcaccaaacacaccttcaccaaccacatggtttttcagtttgactgcacaaacacactcaatgaccagaccttggagaatgtcacagtgcagatggagcccactgaggcctatgaggtgctctgttacgtgcctgcccggagcctgccctacaaccagcccgggacctgctacacactggtggcactgcccaaagaagaccccacagctgtggcctgcacattcagctgcatgatgaagttcactgtcaaggactgtgatcccaccactggggagactgatgacgaaggctatgaggatgagtatgtgctggaagatctggaagttactgtagctgatcacattcaaaaggtcatgaaactgaacttcgaagcagcctgggatgaggtaggggatgaatttgagaaggaggaaacgttcaccttgtctaccatcaagacacttgaagaggctgtgggtaatattgtgaagttcttgggaatgcacccttgtgagaggtcagacaaagtgccggataacaagaacacccacacgttgctcctggctggtgtgttccggggtggtcatgacatcctggtgcgctcccggctgctgcttttggacacagtgacaatgcaggtgacagccagaagtttggaggagctgccagtagacatcatcttggcatctgtgggataagaggccagcctgcataggacctcatacccttcccaagcttctgtattgaaaaacaattaggaatcattgcagatttttttttattctgctcccacctcccacccgggactacttgctggtgacttttttttttttttttttttaaataggggatgattttagcttgtcctaaatcttgctgtccacccttccaggaaagggacattgtaaatgaataaaacattctcaactcctcttgaatctatcccccaagaaaccatcttatccctgtaataaatcagcatgtatttattga

SEQ ID NO: 2127 - DNA, 3083 bp, Homo sapiens
cagtcggggcccggaagtggtccctgtagaaccactgtggcaccgctactccgtgccgcgcccgtcgagcattgcgttgctgcattgcgccccaccgactccactatgttgaagaaattcgacaagaaggatgaggagtcaggtggaggctccaacccattccagcaccttgagaagagtgcggtactccaggaggcccgtgtatttaatgaaactcccatcaaccctcggaaatgtgcccacatcctcaccaagattctttatctcataaaccagggggagcacctggggaccacggaagcgaccgaggccttctttgccatgaccaagctctttcagtccaatgatcccacactccgtcggatgtgctacttgaccatcaaggagatgtcttgcattgcagaggatgtcatcattgtcaccagcagcctaacaaaagacatgactgggaaagaagacaactaccggggcccggccgtgcgagccctctgccagatcactgatagcaccatgctgcaggctattgagcgctacatgaaacaagccattgtggacaaggtgcccagtgtctccagctctgccctcgtgtcttccttgcacctgctgaagtgcagctttgacgtggtcaagcgctgggtgaatgaggctcaggaggcagcatccagtgataacatcatggtccagtaccacgcactagggctcctgtaccatgtgcgtaagaatgaccgcctagccgtcaataagatgatcagcaaggtcacacggcatggccttaagtctccctttgcctactgcatgatgatccgggtggccagcaagcagctggaagaggaggatggcagccgtgacagcccactgtttgacttcatcgagagctgcttgcgcaacaagcacgagatggtggtgtatgaagccgcctcggccatcgtcaatctgccaggctgcagtgccaaagagctggccccggctgtgtcagtgctccagcttttctgcagctcacccaaggctgctctccgctatgctgctgttcgtaccctcaataaggttgccatgaagcatccgtcagctgtgacagcttgtaatctggatctggagaacctggtcacagattcaaaccgcagcattgccacgctggccatcaccaccctccttaagacgggcagcgagagcagcatcgaccgcctcatgaagcagatctcctccttcatgtcagaaatctcggatgaattcaaggtggtggttgtccaggccatcagtgccctgtgtcagaaatatcctcgcaaacacgccgtccttatgaacttcctgttcaccatgctgcgggaagagggtggctttgagtataagcgcgctatcgtggactgcatcatcagcatcattgaagagaactcagagagcaaggagacagggctgtcacatctgtgcgagttcatcgaggactgcgagttcacagtgctggccacccgtattctacatctcctgggccaggaggggcccaagaccaccaatccctcaaagtacatccgcttcatctataaccgagtggtcttggagcatgaggaggtccgggcaggtgctgtgagtgctctggcgaagtttggagcccagaatgaagagatgttacccagtatcttggtgttgctgaagaggtgtgtgatggatgatgacaatgaagtaagggaccgagccaccttctacctaaatgtcctggagcagaagcagaaggcccttaatgcaggctatatcctaaatggtctgactgtgtccatccctggtctggagagggctctgcagcagtacactctagaaccatcagaaaaaccttttgacctcaagtctgtgcccctggccacggcgcccatggcagagcagagaacagaaagtacccccatcacagcagtcaaacagcctgagaaagtggcagctaccaggcaggagatcttccaggagcagttggcagcagtgccagagttccgcggtcttgggcccctcttcaagtcctcgcctgagcccgtggccctcaccgagtcagagacggagtatgtcatccgctgcaccaaacacaccttcaccaaccacatggtttttcagtttgactgcacaaacacactcaatgaccagaccttggagaatgtcacagtgcagatggagcccactgaggcctatgaggtgctctgttacgtgcctgcccggagcctgccctacaaccagcccgggacctgctacacactggtggcactgcccaaagaagaccccacagctgtggcctgcacattcagctgcatgatgaagttcactgtcaaggactgtgatcccaccactggggagactgatgacgaaggctatgaggatgagtatgtgctggaagatctggaagttactgtagctgatcacattcaaaaggtcatgaaactgaacttcgaagcagcctgggatgaggtaggggatgaatttgagaaggaggaaacgttcaccttgtctaccatcaagacacttgaagaggctgtgggtaatattgtgaagttcttgggaatgcacccttgtgagaggtcagacaaagtgccggataacaagaacacccacacgttgctcctggctggtgtgttccggggtggtcatgacatcctggtgcgctcccggctgctgcttttggacacagtgacaatgcaggtgacagccagaagtttggaggagctgccagtagacatcatcttggcatctgtgggataagaggccagcctgcataggacctcatacccttccccaacactacctggaagttgtgccttcctcatgaaactggcagaaaccccttcccaagcttctgtattgaaaaacaattaggaatcattgcagatttttttttattctgctcccacctcccacccgggactacttgctggtgacttttttttttttttttttttaaataggggatgattttagcttgtcctaaatcttgctgtccacccttccaggaaagggacattgtaaatgaataaaacattctcaactcctcttgaatctatcccccaagaaaccatcttatccctgtaataaatcagcatgtatttattgaatga

SEQ ID NO: 2128 - DNA, 2178 bp, Homo sapiens
catgcgttctccgaacggtcttcttccgacagcttgctgccctagaccagagttggtggctggacctcctgcgacttccgagttgcgatgctgtacttctctttgttttgggcggctcggcctctgcagagatgtgggcagctggtcaggatggccattcgggctcagcacagcaacgcagcccagactcagactggggaagcaaacaggggctggacaggccaggagagcctgtcggacagtgatcctgagatgtgggagttgctgcagagggagaaggacaggcagtgtcgtggcctggagctcattgcctcagagaacttctgcagccgagctgcgctggaggccctggggtcctgtctgaacaacaagtactcggagggttatcctggcaagagatactatgggggagcagaggtggtggatgaaattgagctgctgtgccagcgccgggccttggaagcctttgacctggatcctgcacagtggggagtcaatgtccagccctactccgggtccccagccaacctggccgtctacacagcccttctgcaacctcacgaccggatcatggggctggacctgcccgatgggggccatctcacccacggctacatgtctgacgtcaagcggatatcagccacgtccatcttcttcgagtctatgccctataagctcaaccccaaaactggcctcattgactacaaccagctggcactgactgctcgacttttccggccacggctcatcatagctggcaccagcgcctatgctcgcctcattgactacgcccgcatgagagaggtgtgtgatgaagtcaaagcacacctgctggcagacatggcccacatcagtggcctggtggctgccaaggtgattccctcgcctttcaagcacgcggacatcgtcaccaccactactcacaagactcttcgaggggccaggtcagggctcatcttctaccggaaaggggtgaaggctgtggaccccaagactggccgggagatcccttacacatttgaggaccgaatcaactttgccgtgttcccatccctgcaggggggcccccacaatcatgccattgctgcagtagctgtggccctaaagcaggcctgcacccccatgttccgggagtactccctgcaggttctgaagaatgctcgggccatggcagatgccctgctagagcgaggctactcactggtatcaggtggtactgacaaccacctggtgctggtggacctgcggcccaagggcctggatggagctcgggctgagcgggtgctagagcttgtatccatcactgccaacaagaacacctgtcctggagaccgaagtgccatcacaccgggcggcctgcggcttggggccccagccttaacttctcgacagttccgtgaggatgacttccggagagttgtggactttatagatgaaggggtcaacattggcttagaggtgaagagcaagactgccaagctccaggatttcaaatccttcctgcttaaggactcagaaacaagtcagcgtctggccaacctcaggcaacgggtggagcagtttgccagggccttccccatgcctggttttgatgagcattgaaggcacctgggaaatgaggcccacagactcaaagttactctccttccccctacctgggccagtgaaatagaaagcctttctattttttggtgcgggagggaagacctctcacttagggcaagagccaggtatagtctcccttcccagaatttgtaactgagaagatcttttctttttcctttttttggtaacaagacttagaaggagggcccaggcactttctgtttgaacccctgtcatgatcacagtgtcagagacgcgtcctctttcttggggaagttgaggagtgcccttcagagccagtagcaggcaggggtgggtaggcaccctccttcctgtttttatctaataaaatgctaacctgccctgagtttccattactgtgggtggggttcccctgggccaaacagtgatttgtctccctcaatgtgtacaccgctccgctcccaccaccgctaccacaaggacccccggggctgcagcctcctctttctgtctctgatcagagccgacaccagacgtgattagcaggcgcagcaaattcaatttgttaaatgaaattgtattttgcccacg

SEQ ID NO: 2129 - DNA, 2134 bp, Homo sapiens
ttccgacagcttgctgccctagaccagagttggtggctggacctcctgcgacttccgagttgcgatgctgtacttctctttgttttgggcggctcggctggtcaggatggccattcgggctcagcacagcaacgcagcccagactcagactggggaagcaaacaggggctggacaggccaggagagcctgtcggacagtgatcctgagatgtgggagttgctgcagagggagaaggacaggcagtgtcgtggcctggagctcattgcctcagagaacttctgcagccgagctgcgctggaggccctggggtcctgtctgaacaacaagtactcggagggttatcctggcaagagatactatgggggagcagaggtggtggatgaaattgagctgctgtgccagcgccgggccttggaagcctttgacctggatcctgcacagtggggagtcaatgtccagccctactccgggtccccagccaacctggccgtctacacagcccttctgcaacctcacgaccggatcatggggctggacctgcccgatgggggccatctcacccacggctacatgtctgacgtcaagcggatatcagccacgtccatcttcttcgagtctatgccctataagctcaaccccaaaactggcctcattgactacaaccagctggcactgactgctcgacttttccggccacggctcatcatagctggcaccagcgcctatgctcgcctcattgactacgcccgcatgagagaggtgtgtgatgaagtcaaagcacacctgctggcagacatggcccacatcagtggcctggtggctgccaaggtgattccctcgcctttcaagcacgcggacatcgtcaccaccactactcacaagactcttcgaggggccaggtcagggctcatcttctaccggaaaggggtgaaggctgtggaccccaagactggccgggagatcccttacacatttgaggaccgaatcaactttgccgtgttcccatccctgcaggggggcccccacaatcatgccattgctgcagtagctgtggccctaaagcaggcctgcacccccatgttccgggagtactccctgcaggttctgaagaatgctcgggccatggcagatgccctgctagagcgaggctactcactggtatcaggtggtactgacaaccacctggtgctggtggacctgcggcccaagggcctggatggagctcgggctgagcgggtgctagagcttgtatccatcactgccaacaagaacacctgtcctggagaccgaagtgccatcacaccgggcggcctgcggcttggggccccagccttaacttctcgacagttccgtgaggatgacttccggagagttgtggactttatagatgaaggggtcaacattggcttagaggtgaagagcaagactgccaagctccaggatttcaaatccttcctgcttaaggactcagaaacaagtcagcgtctggccaacctcaggcaacgggtggagcagtttgccagggccttccccatgcctggttttgatgagcattgaaggcacctgggaaatgaggcccacagactcaaagttactctccttccccctacctgggccagtgaaatagaaagcctttctattttttggtgcgggagggaagacctctcacttagggcaagagccaggtatagtctcccttcccagaatttgtaactgagaagatcttttctttttcctttttttggtaacaagacttagaaggagggcccaggcactttctgtttgaacccctgtcatgatcacagtgtcagagacgcgtcctctttcttggggaagttgaggagtgcccttcagagccagtagcaggcaggggtgggtaggcaccctccttcctgtttttatctaataaaatgctaacctgccctgagtttccattactgtgggtggggttcccctgggccaaacagtgatttgtctccctcaatgtgtacaccgctccgctcccaccaccgctaccacaaggacccccggggctgcagcctcctctttctgtctctgatcagagccgacaccagacgtgattagcaggcgcagcaaattcaatttgttaaatgaaattgtattttgcccacg

SEQ ID NO: 2130 - DNA, 2113 bp, Homo sapiens
ccgagttgcgatgctgtacttctctttgttttgggcggctcggcctctgcagagatgtgggcagctggtcaggatggccattcgggctcagcacagcaacgcagcccagactcagactggggaagcaaacaggggctggacaggccaggagagcctgtcggacagtgatcctgagatgtgggagttgctgcagagggagaaggacaggcagtgtcgtggcctggagctcattgcctcagagaacttctgcagccgagctgcgctggaggccctggggtcctgtctgaacaacaagtactcggagggttatcctggcaagagatactatgggggagcagaggtggtggatgaaattgagctgctgtgccagcgccgggccttggaagcctttgacctggatcctgcacagtggggagtcaatgtccagccctactccgggtccccagccaacctggccgtctacacagcccttctgcaacctcacgaccggatcatggggctggacctgcccgatgggggccatctcacccacggctacatgtctgacgtcaagcggatatcagccacgtccatcttcttcgagtctatgccctataagctcaaccccaaaactggcctcattgactacaaccagctggcactgactgctcgacttttccggccacggctcatcatagctggcaccagcgcctatgctcgcctcattgactacgcccgcatgagagaggtgtgtgatgaagtcaaagcacacctgctggcagacatggcccacatcagtggcctggtggctgccaaggtgattccctcgcctttcaagcacgcggacatcgtcaccaccactactcacaagactcttcgaggggccaggtcagggctcatcttctaccggaaaggggtgaaggctgtggaccccaagactggccgggagatcccttacacatttgaggaccgaatcaactttgccgtgttcccatccctgcaggggggcccccacaatcatgccattgctgcagtagctgtggccctaaagcaggcctgcacccccatgttccgggagtactccctgcaggttctgaagaatgctcgggccatggcagatgccctgctagagcgaggctactcactggtatcaggtggtactgacaaccacctggtgctggtggacctgcggcccaagggcctggatggagctcgggctgagcgggtgctagagcttgtatccatcactgccaacaagaacacctgtcctggagaccgaagtgccatcacaccgggcggcctgcggcttggggccccagccttaacttctcgacagttccgtgaggatgacttccggagagttgtggactttatagatgaaggggtcaacattggcttagaggtgaagagcaagactgccaagctccaggatttcaaatccttcctgcttaaggactcagaaacaagtcagcgtctggccaacctcaggcaacgggtggagcagtttgccagggccttccccatgcctggttttgatgagcattgaaggcacctgggaaatgaggcccacagactcaaagttactctccttccccctacctgggccagtgaaatagaaagcctttctattttttggtgcgggagggaagacctctcacttagggcaagagccaggtatagtctcccttcccagaatttgtaactgagaagatcttttctttttcctttttttggtaacaagacttagaaggagggcccaggcactttctgtttgaacccctgtcatgatcacagtgtcagagacgcgtcctctttcttggggaagttgaggagtgcccttcagagccagtagcaggcaggggtgggtaggcaccctccttcctgtttttatctaataaaatgctaacctgccctgagtttccattactgtgggtggggttcccctgggccaaacagtgatttgtctccctcaatgtgtacaccgctccgctcccaccaccgctaccacaaggacccccggggctgcagcctcctctttctgtctctgatcagagccgacaccagacgtgattagcaggcgcagcaaattcaatttgttaaatgaaattgtattttgaaaaaaaaaaaaaaaaaa

SEQ ID NO: 2131 - DNA, 2178 bp, Homo sapiens; identical to SEQ ID NO: 2128

SEQ ID NO: 2132 - DNA, 2809 bp, Homo sapiens
catgcgttctccgaacggtcttcttccgacagcttgctgccctagaccagagttggtggctggacctcctgcgacttccgagttgcgatgctgtacttctctttgttttgggcggctcggcctctgcagagatgtgggcagctggtcaggatggccattcgggctcagcacagcaacgcagcccagactcagactggggaagcaaacaggggctggacaggccaggagagcctgtcggacagtgatcctgagatgtgggagttgctgcagagggagaaggacaggcagtgtcgtggcctggagctcattgcctcagaggtgggacctggggagatgggcaggggttgggccaccatgggtacaggaagtaacaaagttatcttaactgatatttctccaaaaccccctttcacactcaggacctttctttgggctttatcttcctttcttatctccctcaagcaaaggcagtgcaagtccagtttatggggttgggacatttagggagcctccagggtccctacagtttcatctgatcccttccttcctcctatgaggaaggaggagcctagaagcacaagtttgagtgggtaggtggcattgaggggccactgctcatggcagatgggtttctgagaatgctgcctctggctttgccccaggcctggtgctgagtgaatggagctttctgcagggagtactcccgctttcagctctggctctggcagggagggactgtgggagtccaggggaaggggctcaataccttctgacattgccccccaccaccccagaacttctgcagccgagctgcgctggaggccctggggtcctgtctgaacaacaagtactcggagggttatcctggcaagaggtgagggctggagggcagtgtcagggatggtgctcccagtgggggaacccacctgtaccttcccagtgttcattgaggagtgaacttcccagtcctttgctgatggttgagagtcctttctctgtgccctcattacccctctcccacggcagatactatgggggagcagaggtggtggatgaaattgagctgctgtgccagcgccgggccttggaagcctttgacctggatcctgcacagtggggagtcaatgtccagccctactccgggtccccagccaacctggccgtctacacagcccttctgcaacctcacgaccggatcatggggctggacctgcccgatgggggccatctcacccacggctacatgtctgacgtcaagcggatatcagccacgtccatcttcttcgagtctatgccctataagctcaacgtgagtgctctaggtgtgtctgtccagcccaaaactggcctcattgactacaaccagctggcactgactgctcgacttttccggccacggctcatcatagctggcaccagcgcctatgctcgcctcattgactacgcccgcatgagagaggtgtgtgatgaagtcaaagcacacctgctggcagacatggcccacatcagtggcctggtggctgccaaggtgattccctcgcctttcaagcacgcggacatcgtcaccaccactactcacaagactcttcgaggggccaggtcagggctcatcttctaccggaaaggggtgaaggctgtggaccccaagactggccgggagatccctttgccgtgttcccatccctgcaggggggcccccacaatcatgccattgctgcagtagctgtggccctaaagcaggcctgcacccccatgttccgggagtactccctgcaggttctgaagaatgctcgggccatggcagatgccctgctagagcgaggctactcactggtatcaggtggtactgacaaccacctggtgctggtggacctgcggcccaagggcctggatggagctcgggctgagcgggtgctagagcttgtatccatcactgccaacaagaacacctgtcctggagaccgaagtgccatcacaccgggcggcctgcggcttggtgagaccccagccttaacttctcgacagttccgtgaggatgacttccggagagttgtggactttatagatgaaggggtcaacattggcttagaggtgaagagcaagatctagccaagctccaggatttcaaatccttcctgcttaaggactcagaaacaagtcagcgtctggccaacctcaggcaacgggtggagcagtttgccagggccttccccatgcctggttttgatgagcattgaaggcacctgggaaatgaggcccacagactcaaagttactctccttccccctacctgggccagtgaaatagaaagcctttctattttttggtgcgggagggaagacctctcacttagggcaagagccaggtatagtctcccttcccagaatttgtaactgagaagatcttttctttttcctttttttggtaacaagacttagaaggagggcccaggcactttctgtttgaacccctgtcatgatcacagtgtcagagacgcgtcctctttcttggggaagttgaggagtgcccttcagagccagtagcaggcaggggtgggtaggcaccctccttcctgtttttatctaataaaatgctaacctgccctgagtttccattactgtgggtggggttcccctgggccaaacagtgatttgtctccctcaatgtgtacaccgctccgctcccaccaccgctaccacaaggacccccggggctgcagcctcctctttctgtctctgatcagagccgacaccagacgtgattagcaggcgcagcaaattcaatttgttaaatgaaattgtattttgcc

SEQ ID NO: 2133 - DNA, 2178 bp, Homo sapiens; identical to SEQ ID NO: 2128

SEQ ID NO: 2134 - DNA, 2178 bp, Homo sapiens; identical to SEQ ID NO: 2128

SEQ ID NO: 2135 - DNA, 5191 bp, Homo sapiens; identical to SEQ ID NO: 1801

SEQ ID NO: 2136 - DNA, 1515 bp, Homo sapiens; identical to SEQ ID NO: 1839

SEQ ID NO: 2137 - DNA, 5508 bp, Homo sapiens
cgcaggaaaacacaggcccctccggctttcgctctcgctctgggaactggaaggacccccgactcccgcgcagggtctggggttgtgcgcgtcgggttgcgtctccaggccgggggcgtcagggagccgggggcggggacgggcgcgggcgcagcggaccgggcggggccgagccgggaagctggtcggtgcgtcagcctcacgcggcgggaaggaaccggtccgaggccccgggctgccggcgcgggcgccgcggcacgtccacaggctgggtcgcgaggtggcgatcgctgagaggcaggagggccgaggcgggcctgggaggcggcccggaggtggggcgccgctggggccggcccgcacgggcttcatctgagggcgcacggcccgcgaccgagcgtgcggactggcctcccaagcgtggggcgacaagctgccggagctgcaatgggccgcggctggggattcttgtttggcctcctgggcgccgtgtggctgctcagctcgggccacggagaggagcagcccccggagacagcggcacagaggtgcttctgccaggttagtggttacttggatgattgtacctgtgatgttgaaaccattgatagatttaataactacaggcttttcccaagactacaaaaacttcttgaaagtgactactttaggtattacaaggtaaacctgaagaggccgtgtcctttctggaatgacatcagccagtgtggaagaagggactgtgctgtcaaaccatgtcaatctgatgaagttcctgatggaattaaatctgcgagctacaagtattctgaagaagccaataatctcattgaagaatgtgaacaagctgaacgacttggagcagtggatgaatctctgagtgaggaaacacagaaggctgttcttcagtggaccaagcatgatgattcttcagataacttctgtgaagctgatgacattcagtcccctgaagctgaatatgtagatttgcttcttaatcctgagcgctacactggttacaagggaccagatgcttggaaaatatggaatgtcatctacgaagaaaactgttttaagccacagacaattaaaagacctttaaatcctttggcttctggtcaaggtaaattacttatagaacactttttacagttggctagaaggtctctgtgtagaaaaaagagcattctacagacttatatctggcctacatgcaagcattaatgtgcatttgagtgcaagatatcttttacaagagacctggttagaaaagaaatggggacacaacattacagaatttcaacagcgatttgatggaattttgactgaaggagaaggtccaagaaggcttaagaacttgtattttctctacttaatagaactaagggctttatccaaagtgttaccattcttcgagcgcccagattttcaactctttactggaaataaaattcaggatgaggaaaacaaaatgttacttctggaaatacttcatgaaatcaagtcatttcctttgcattttgatgagaattcattttttgctggggataaaaaagaagcacacaaactaaaggaggactttcgactgcattttagaaatatttcaagaattatggattgtgttggttgttttaaatgtcgtctgtggggaaagcttcagactcagggtttgggcactgctctgaagatcttattttctgagaaattgatagcaaatatgccagaaagtggacctagttatgaattccatctaaccagacaagaaatagtatcattattcaacgcatttggaagaatttctacaagtgtgaaagaattagaaaacttcaggaacttgttacagaatattcattaaagaaaacaagctgatatgtgcctgtttctggacaatggaggcgaaagagtggaatttcattcaaaggcataatagcaatgacagtcttaagccaaacattttatataaagttgcttttgtaaaggagaattatattgttttaagtaaacacatttttaaaaattgtgttaagtctatgtataatactactgtgagtaaaagtaatactttaataatgtggtacaaattttaaagtttaatattgaataaaaggaggattatcaaattcatatatgataaaagtgaatgttctaagtctctcaaactagcgttttatgtaataatatgtaatataaataaaactatggtaaatgtgacaagcatttaataggaaaatgctaaggaggcctcataaatgacccataattaccaacgtagaatttttcagtacatttagggttgctggatttagcaaataaaaataaagattgcccagttagatttgaatttcagataaacaattagttttttaatattttacatggaatatttggaaaatacttatactaaaaaattatttgtttgaaattcaaatttaactgggagtcttgtattttatctggcaatcctaaaatacattggtatgaaacaaatcacttttagaagtatattgctattttgattgggttgtttttgtgtgtagaaacgtacaataacaactcaaaggcacaggagatttctaaacattgtgaaaagttgaatagattatatatttattctcataatactttcactaatactaaataaaatttggggaacactttttatttttatataatttccaatttacagaaaagtttcaaaaatagtacaaagagctctcttacccagattcactaattgttcatacgtgctttatctttcatgctttctctgtacacacacacacacacacaaatttttcctcaatcatttgaaagtcagttataggcatcatgccccttaaaccctaaatacttcagtgtgtaatactgaataattactaaaaatgattttctcagaaaaaaaaactcccacaattctggaactataatactgtaagccttagaataaataatactttcaagttccaatctaaagttctttttgagttttgttgcccgttttatgcttgatgtgtatagtaatagggtaggctatttattttattaaaattttttttagagacaaggttttgctgtgttgcccaagctggaacttgaacgactgggctgaagtgatcttcccacctcagcctcccaagtagctgggaatacaggtgtctgccaccatacccagtttcatttttgttttttatacccgaagttcatttcctttgtctccctaaaactgaactgtaattttgggaggttttcattagtggaagctcttcatttataaagctatttgaaggggtttaggaatttatatcacatggtaattgtagagaaaaagaagctatatacctcaaaatcgtgccctctttacatatgtcttatcaggtataacatgttgaaatgtcacattagtagtaaagtggggtttatttatatagtggttaagaaatgtcagtttacactgctgtatacttcttcttctgtgtccctaaggcctggtacagtgccaagcacatacttggtatccaataaatatttgttggatgaatgtatgcatatgtattcagtatattttaaatgaataatcacagaagtaagtttaataatttgtcctatttttctctgtcacttcctttttctctaaggcaggaaaggaaagacattaaaccattaattaagtcaatcctcttggagactcaaaagactatgaagtgatcactctatataaaatataaatacagtgtgggttcaaatggccattttttgtgtgtccctctctctcatcttatgcttcccttcctttttttatttttattttttggagacggagtcttgctgtgtcgcccaggttggagtgcagtggcgtgatcttagctcactgcaagctctgccttccaggttcacgccattcttctgcctcagccccctgagtagctgggactacaggcgcccgccaccacgcccggctaatttttttttttttttttttgtatttttagtagaggcagtgtttcaccgtgttagccaggatggtctcgatctcctgacctcgtgatccacccacctcgacctcccaaagtgctgggattacaggcgtgagccaccacgcccggcctcttttttttttagctgccaatctttttgaaggaatattcttacctctactttgtcaccttctactggctccttaactaaaatctgccatttggctctctggttaacagtcccttcctgtaaagtctaaaatcttaattctaaatccacagtttaattcacaagctagtacttgactttttttctgtatttgacatttttgacaacccctactttaaagatttattcccttgacttcttacattttgctcactcctgaaccaccccccaccttttggcctcttcatttattccttaaatgttattcctcagacctccattttttttttctctcttaatcacaacaccacttctcacgcttgggtaattttaattcagcagttcctaaatccttatctttagccagactcctcaatccatctgcctgttgcacttttcttggttgtcccagagacacctgtgtgtgtcttaaaacattcattctctgcaaaacctactctaatgcctgtgtcccttactttggttaattttagaaccattatattctaagttttctaggctcattcctctcctccaccttcccctatcatttagtgtctaagttttactgattttatctccacctctctgatacatcactctttcatcttcattgctattattaataaatacctacagtactaacctgcctcctatacctagctggtctcctctctgttgctcaatgttaccacagcaggctttctagaagcactctgacagtgttactccctaatatccttcagtgacttcaggaactttcaggagaaagccaaactcctctgtttggtgtacaaggtcttctgatgtgtttcctccaccgaatgttctggtgaaacagacttacacttcttcagaagccacatttggccaggcctcccgccttggtaaatgctgtactctttgcatcaagtgtgctagtcatccttccccacttggaaaattcctatgcatcttgcaggcctgacataagcatttcctctgtgaaacctcctttgctccactcaaggagagtcatctaacttccactttcgtgtcaccactgtaattacaacctacctctattgtatgtcacttaaatcgtactgtattgttttatttttcaaaagtctttactagaatgtgagctccttaagggcaggaaaaggaacctttttattttttgcatctccatagcatagtttttggcatatgaatgtttaataaatgtttgttgaataaattgattttaaagtgacatctttattatattagaggtcctacctatattccaaatactttcactcccttcactttacagcaagggtcagtagagtcccaaggatttgtagactttagggggtcaataaagctgaaattgtattc

SEQ ID NO: 2138 - DNA, 6907 bp, Homo sapiens
ggcgggagccgcgtgcgcccgaggacccggccggaaggcttgcgccagctcaggatgaggacaggctgggcgacccctcgccgcccggcggggctcctcatgctgctcttctggttcttcgatctcgcggagccctctggccgcgcagctaatgaccccttcaccatcgtccatggaaatacgggcaagtgcatcaagccagtgtatggctggatagtagcagacgactgtgatgaaactgaggacaagttatggaagtgggtgtcccagcatcggctctttcatttgcactcccaaaagtgccttggcctcgatattaccaaatcggtaaatgagctgagaatgttcagctgtgactccagtgccatgctgtggtggaaatgtgagcaccactctctgtacggagctgcccggtaccggctggctctgaaggatggacatggcacagcaatctcaaatgcatctgatgtctggaagaaaggaggctcagaggaaagcctttgtgaccagccttatcatgagatctataccagagatgggaactcttatgggagaccttgtgaatttccattcttaattgatgggacctggcatcatgattgcattcttgatgaagatcatagtgggccatggtgtgccaccaccttaaattatgaatatgaccgaaagtggggcatctgcttaaagcctgaaaacggttgtgaagataattgggaaaagaacgagcagtttggaagttgctaccaatttaatactcagacggctctttcttggaaagaagcttatgtttcatgtcagaatcaaggagctgatttactgagcatcaacagtgctgctgaattaacttaccttaaagaaaaagaaggcattgctaagattttctggattggtttaaatcagctatactctgctagaggctgggaatggtcagaccacaaaccattaaactttctcaactgggatccagacaggcccagtgcacctactataggtggctccagctgtgcaagaatggatgctgagtctggtctgtggcagagcttttcctgtgaagctcaactgccctatgtctgcaggaaaccattaaataatacagtggagttaacagatgtctggacatactcagatacccgctgtgatgcaggctggctgccaaataatggattttgctatctgctggtaaatgaaagtaattcctgggataaggcacatgcgaaatgcaaagccttcagtagtgacctaatcagcattcattctctagcagatgtggaggtggttgtcacaaaactccataatgaggatatcaaagaagaagtgtggataggccttaagaacataaacataccaactttatttcagtggtcagatggtactgaagttactctaacatattgggatgagaatgagccaaatgttccctacaataagacgcccaactgtgtttcctacttaggagagctaggtcagtggaaagtccaatcatgtgaggagaaactaaaatatgtatgcaagagaaagggagaaaaactgaatgacgcaagttctgataagatgtgtcctccagatgagggctggaagagacatggagaaacctgttacaagatttatgaggatgaggtcccttttggaacaaactgcaatctgactatcactagcagatttgagcaagaatacctaaatgatttgatgaaaaagtatgataaatctctaagaaaatacttctggactggcctgagagatgtagattcttgtggagagtataactgggcaactgttggtggaagaaggcgggctgtaaccttttccaactggaattttcttgagccagcttccccgggcggctgcgtggctatgtctactggaaagtctgttggaaagtgggaggtgaaggactgcagaagcttcaaagcactttcaatttgcaagaaaatgagtggaccccttgggcctgaagaagcatcccctaagcctgatgacccctgtcctgaaggctggcagagtttccccgcaagtctttcttgttataaggtattccatgcagaaagaattgtaagaaagaggaactgggaagaagctgaacgattctgccaagcccttggagcacacctttctagcttcagccatgtggatgaaataaaggaatttcttcactttttaacggaccagttcagtggccagcattggctgtggattggtttgaataaaaggagcccagatttacaaggatcctggcaatggagtgatcgtacaccagtgtctactattatcatgccaaatgagtttcagcaggattatgacatcagagactgtgctgctgtcaaggtatttcataggccatggcgaagaggctggcatttctatgatgatagagaatttatttatttgaggccttttgcttgtgatacaaaacttgaatgggtgtgccaaattccaaaaggccgtactccaaaaacaccagactggtacaatccagagcgtgctggaattcatggacctccacttataattgaaggaagtgaatattggtttgttgctgatcttcacctaaactatgaagaagccgtcctgtactgtgccagcaatcacagctttcttgcaactataacatcttttgtgggactaaaagccatcaaaaacaaaatagcaaatatatctggtgatggacagaagtggtggataagaattagcgagtggccaatagatgatcattttacatactcacgatatccatggcaccgctttcctgtgacatttggagaggaatgcttgtacatgtctgccaagacttggcttatcgacttaggtaaaccaacagactgtagtaccaagttgcccttcatctgtgaaaaatataatgtttcttcgttagagaaatacagcccagattctgcagctaaagtgcaatgttctgagcaatggattccttttcagaataagtgttttctaaagatcaaacccgtgtctctcacattttctcaagcaagcgatacctgtcactcctatggtggcacccttccttcagtgttgagccagattgaacaagactttattacatccttgcttccggatatggaagctactttatggattggtttgcgctggactgcctatgaaaagataaacaaatggacagataacagagagctgacgtacagtaactttcacccattattggttagtgggaggctgagaataccagaaaatttttttgaggaagagtctcgctaccactgtgccctaatactcaacctccaaaaatcaccgtttactgggacgtggaattttacatcctgcagtgaacgccactttgtgtctctctgtcagaaatattcagaagttaaaagcagacagacgttgcagaatgcttcagaaactgtaaagtatctaaataatctgtacaaaataatcccaaagactctgacttggcacagtgctaaaagggagtgtctgaaaagtaacatgcagctggtgagcatcacggacccttaccagcaggcattcctcagtgtgcaggcgctccttcacaactcttccttatggatcggactcttcagtcaagatgatgaactcaactttggttggtcagatgggaaacgtcttcattttagtcgctgggctgaaactaatgggcaactcgaagactgtgtagtattagacactgatggattctggaaaacagttgattgcaatgacaatcaaccaggtgctatttgctactattcaggaaatgagactgaaaaagaggtcaaaccagttgacagtgttaaatgtccatctcctgttctaaatactccgtggataccatttcagaactgttgctacaatttcataataacaaagaataggcatatggcaacaacacaggatgaagttcatactaaatgccagaaactgaatccaaaatcacatattctgagtattcgagatgaaaaggagaataactttgttcttgagcaactgctgtacttcaattatatggcttcatgggtcatgttaggaataacttatagaaataattctcttatgtggtttgataagaccccactgtcatatacacattggagagcaggaagaccaactataaaaaatgagaagtttttggctggtttaagtactgacggcttctgggatattcaaacctttaaagttattgaagaagcagtttattttcaccagcacagcattcttgcttgtaaaattgaaatggttgactacaaagaagaatataatactacactgccacagtttatgccatatgaagatggtatttacagtgttattcaaaaaaaggtaacatggtatgaagcattaaacatgtgttctcaaagtggaggtcacttggcaagcgttcacaaccaaaatggccagctctttctggaagatattgtaaaacgtgatggatttccactatgggttgggctctcaagtcatgatggaagtgaatcaagttttgaatggtctgatggtagtacatttgactatatcccatggaaaggccaaacatctcctggaaattgtgttctcttggatccaaaaggaacttggaaacatgaaaaatgcaactctgttaaggatggtgctatttgttataaacctacaaaatctaaaaagctgtcccgtcttacatattcatcaagatgtccagcagcaaaagagaatgggtcacggtggatccagtacaagggtcactgttacaagtctgatcaggcattgcacagtttttcagaggccaaaaaattgtgttcaaaacatgatcactctgcaactatcgtttccataaaagatgaagatgagaataaatttgtgagcagactgatgagggaaaataataacattaccatgagagtttggcttggattatctcaacattctgttgaccagtcttggagttggttagatggatcagaagtgacatttgtcaaatgggaaaataaaagtaagagtggtgttggaagatgtagcatgttgatagcttcaaatgaaacttggaaaaaagttgaatgtgaacatggttttggaagagttgtctgcaaagtgcctctgggccctgattacacagcaatagctatcatagttgccacactaagtatcttagttctcatgggcggactgatttggttcctcttccaaaggcaccgtttgcacctggcgggtttctcatcagttcgatatgcacaaggagtgaatgaagatgagattatgcttccttctttccatgactaaattcttctaaaagttttctaatttgcactaatgtgttatgagaaattagtcacttaaaatgtcccagtgtcagtatttactctgctccaaagtagaactcttaaatactttttcagttgtttagatcttaggcatgtgctggtatccacagttaattccctgctaaatgccatgtttatcaccctaattaatagaatggaggggactccaaagctggaactgaagtccaaattgtttgtacagtaatatgtttaatgttcattttctctgtatgaatgtgattggtaactaggatatgtatattttaatagaatttttaacaaaacttcttagaaaattaaaataggcatattactaggtgacatgtctactttttaatttttaagagcatccggccaaatgcaaaattagtacctcaaagtaaaaattgaactgtaaactctatcagcattgtttcaaaatagtcatttttagcactggggaaaaataaacaataagacatgcttactttttaatttttatttttttgagactgagtctctctctgttgcccaggctggagtacaatggcgtgatctcggctcactgcaaatctccgcctcccaggttcaagcgattctcctgcctcagcctcctgagtagctgggattacaggcaactgccaccatgcccggctaatttttgtatttttagtagagatggggtttcaccatgttggccaggctggtctcgaactcgtgaccgcaggtgatcctcccgcctcggcctcccaaagtgctgggattacaggcatgagccaccgcgcctggcctctgcttactttttatatagcaaaatgattcctcttggcaagatgtttcttatattattccaaagttatttcataccattattatgtaaatatgaagagtttttttctgtttataattgtttataaaacaatgacttttaaagatttagtgcttaacattttcccaagtgtgggaacattatttttagattgagtaggtaccttgtagcagtgtgctttgcattttctgatgtattacatgactgtttcttttgtaaagagaatcaactaggtatttaagactgataattttacaatttatatgcttcacatagcatgtcaacttttgactaagaattttgttttacttttttaacatgtgttaaacagagaaagggtccatgaaggaaagtgtatgagttgcatttgtaaaaatgagactttttcagtggaactctaaaccttgtgatgactactaacaaatgtaaaattatgagtgattaagaaaacattgctttgtggttatcactttaagttttgacacctagattatagtcttagtaatagcatccactggaaaaggtgaaaatgttttattcagcatttaacttacatttgtactttagagtatttttgtataaaatccatagatttattttacatttagagtatttacactatgataaagttgtaaataattttctaagacagtttttatatagtctacagttgtcctgatttcttattgaatttgttagactagttctcttgtcctgtgatctgtgtacaattttagtcactaagactttcctccaagaactaagccaacttgatgtgaaaagcacagctgtatataatggtgatgtcataataaagttgttttatcttttaagt

SEQ ID NO: 2139 - DNA, 6928 bp, Homo sapiens
ggcgggagcgcgtgcgcccgaggacccggccggaaggcttgcgccagctcaggatgaggacaggctgggcgacccctcgccgcccggcggggctcctcatgctgctcttctggttcttcgatctcgcggagccctctggccgcgcagctaatgaccccttcaccatcgtccatggaaatacgggcaagtgcatcaagccagtgtatggctggatagtagcagacgactgtgatgaaactgaggacaagttatggaagtgggtgtcccagcatcggctctttcatttgcactcccaaaagtgccttggcctcgatattaccaaatcggtaaatgagctgagaatgttcagctgtgactccagtgccatgctgtggtggaaatgtgagcaccactctctgtacggagctgcccggtaccggctggctctgaaggatggacatggcacagcaatctcaaatgcatctgatgtctggaagaaaggaggctcagaggaaagcctttgtgaccagccttatcatgagatctataccagagatgggaactcttatgggagaccttgtgaatttccattcttaattgatgggacctggcatcatgattgcattcttgatgaagatcatagtgggccatggtgtgccaccaccttaaattatgaatatgaccgaaagtggggcatctgcttaaagcctgaaaacggttgtgaagataattgggaaaagaacgagcagtttggaagttgctaccaatttaatactcagacggctctttcttggaaagaagcttatgtttcatgtcagaatcaaggagctgatttactgagcatcaacagtgctgctgaattaacttaccttaaagaaaaagaaggcattgctaagattttctggattggtttaaatcagctatactctgctagaggctgggaatggtcagaccacaaaccattaaactttctcaactgggatccagacaggcccagtgcacctactataggtggctccagctgtgcaagaatggatgctgagtctggtctgtggcagagcttttcctgtgaagctcaactgccctatgtctgcaggaaaccattaaataatacagtggagttaacagatgtctggacatactcagatacccgctgtgatgcaggctggctgccaaataatggattttgctatctgctggtaaatgaaagtaattcctgggataaggcacatgcgaaatgcaaagccttcagtagtgacctaatcagcattcattctctagcagatgtggaggtggttgtcacaaaactccataatgaggatatcaaagaagaagtgtggataggccttaagaacataaacataccaactttatttcagtggtcagatggtactgaagttactctaacatattgggatgagaatgagccaaatgttccctacaataagacgcccaactgtgtttcctacttaggagagctaggtcagtggaaagtccaatcatgtgaggagaaactaaaatatgtatgcaagagaaagggagaaaaactgaatgacgcaagttctgataagatgtgtcctccagatgagggctggaagagacatggagaaacctgttacaagatttatgaggatgaggtcccttttggaacaaactgcaatctgactatcactagcagatttgagcaagaatacctaaatgatttgatgaaaaagtatgataaatctctaagaaaatacttctggactggcctgagagatgtagattcttgtggagagtataactgggcaactgttggtggaagaaggcgggctgtaaccttttccaactggaattttcttgagccagcttccccgggcggctgcgtggctatgtctactggaaagtctgttggaaagtgggaggtgaaggactgcagaagcttcaaagcactttcaatttgcaagaaaatgagtggaccccttgggcctgaagaagcatcccctaagcctgatgacccctgtcctgaaggctggcagagtttccccgcaagtctttcttgttataaggtattccatgcagaaagaattgtaagaaagaggaactgggaagaagctgaacgattctgccaagcccttggagcacacctttctagcttcagccatgtggatgaaataaaggaatttcttcactttttaacggaccagttcagtggccagcattggctgtggattggtttgaataaaaggagcccagatttacaaggatcctggcaatggagtgatcgtacaccagtgtctactattatcatgccaaatgagtttcagcaggattatgacatcagagactgtgctgctgtcaaggtatttcataggccatggcgaagaggctggcatttctatgatgatagagaatttatttatttgaggccttttgcttgtgatacaaaacttgaatgggtgtgccaaattccaaaaggccgtactccaaaaacaccagactggtacaatccagaccgtgctggaattcatggacctccacttataattgaaggaagtgaatattggtttgttgctgatcttcacctaaactatgaagaagccgtcctgtactgtgccagcaatcacagctttcttgcgactataacatcttttgtgggactaaaagccatcaaaaacaaaatagcaaatatatctggtgatggacagaagtggtggataagaattagcgagtggccaatagatgatcattttacatactcacgatatccatggcaccgctttcctgtgacatttggagaggaatgcttgtacatgtctgccaagacttggcttatcgacttaggtaaaccaacagactgtagtaccaagttgcccttcatctgtgaaaaatataatgtttcttcgttagagaaatacagcccagattctgcagctaaagtgcaatgttctgagcaatggattccttttcagaataagtgttttctaaagatcaaacccgtgtctctcacattttctcaagcaagcgatacctgtcactcctatggtggcacccttccttcagtgttgagccagattgaacaagactttattacatccttgcttccggatatggaagctactttatggattggtttgcgctggactgcctatgaaaagataaacaaatggacagataacagagagctgacgtacagtaactttcacccattattggttagtgggaggctgagaataccagaaaatttttttgaggaagagtctcgctaccactgtgccctaatactcaacctccaaaaatcaccgtttactgggacgtggaattttacatcctgcagtgaacgccactttgtgtctctctgtcagaaatattcagaagttaaaagcagacagacgttgcagaatgcttcagaaactgtaaagtatctaaataatctgtacaaaataatcccaaagactctgacttggcacagtgctaaaagggagtgtctgaaaagtaacatgcagctggtgagcatcacggacccttaccagcaggcattcctcagtgtgcaggcgctccttcacaactcttccttatggatcggactcttcagtcaagatgatgaactcaactttggttggtcagatgggaaacgtcttcattttagtcgctgggctgaaactaatgggcaactcgaagactgtgtagtattagacactgatggattctggaaaacagttgattgcaatgacaatcaaccaggtgctatttgctactattcaggaaatgagactgaaaaagaggtcaaaccagttgacagtgttaaatgtccatctcctgttctaaatactccgtggataccatttcagaactgttgctacaatttcataataacaaagaataggcatatggcaacaacacaggatgaagttcatactaaatgccagaaactgaatccaaaatcacatattctgagtattcgagatgaaaaggagaataactttgttcttgagcaactgctgtacttcaattatatggcttcatgggtcatgttaggaataacttatagaaataattctcttatgtggtttgataagaccccactgtcatatacacattggagagcaggaagaccaactataaaaaatgagaagtttttggctggtttaagtactgacggcttctgggatattcaaacctttaaagttattgaagaagcagtttattttcaccagcacagcattcttgcttgtaaaattgaaatggttgactacaaagaagaacataatactacactgccacagtttatgccatatgaagatggtatttacagtgttattcaaaaaaaggtaacatggtatgaagcattaaacatgtgttctcaaagtggaggtcacttggcaagcgttcacaaccaaaatggccagctctttctggaagatattgtaaaacgtgatggatttccactatgggttgggctctcaagtcatgatggaagtgaatcaagttttgaatggtctgatggtagtacatttgactatatcccatggaaaggccaaacatctcctggaaattgtgttctcttggatccaaaaggaacttggaaacatgaaaaatgcaactctgttaaggatggtgctatttgttataaacctacaaaatctaaaaagctgtcccgtcttacatattcatcaagatgtccagcagcaaaagagaatgggtcacggtggatccagtacaagggtcactgttacaagtctgatcaggcattgcacagtttttcagaggccaaaaaattgtgttcaaaacatgatcactctgcaactatcgtttccataaaagatgaagatgagaataaatttgtgagcagactgatgagggaaaataataacattaccatgagagtttggcttggattatctcaacattctgttgaccagtcttggagttggttagatggatcagaagtgacatttgtcaaatgggaaaataaaagtaagagtggtgttggaagatgtagcatgttgatagcttcaaatgaaacttggaaaaaagttgaatgtgaacatggttttggaagagttgtctgcaaagtgcctctgggccctgattacacagcaatagctatcatagttgccacactaagtatcttagttctcatgggcggactgatttggttcctcttccaaaggcaccgtttgcacctggcgggtttctcatcagttcgatatgcacaaggagtgaatgaagatgagattatgcttccttctttccatgactaaattcttctaaaagttttctaatttgcactaatgtggttatggagaaattagtcacttaaaatgtcccagtgtcagtatttactctgctccaaagtagaactcttaaatactttttcagttgtttagatcttaggcatgtgctggtatccacagttaattccctgctaaatgccatgtttatcaccctaattaatagaatggaggggactccaaagctggaactgaagtccaaattgtttgtacagtaatatgtttaatgttcattttctctgtatgaatgtgattggtaactaggatatgtatattttaatagaatttttaacaaaacttcttagaaaattaaaataggcatattactaggtgacatgtctactttttaatttttaagagcatccggccaaatgcaaaattagtacctcaaagtaaaaattgaactgtaaactctatcagcattgtttcaaaatagtcatttttagcactggggaaaaataaacaataagacatgcttactttttaatttttatttttttgagactgagtctctctctgttgcccaggctggagtacaatggcgtgatctcggctcactgcaaatctccgcctcccaggttcaagcgattctcctgcctcagcctcctgagtagctgggattacaggcaactgccaccatgcccggctaatttttgtatttttagtagagatggggtttcaccatgttggccaggctggtctcgaactcgtgaccgcagtgatcctcccgcctcggcctcccaaagtgctgggattacaggcatgagccaccgcgcctggcctctgcttactttttatatagcaaaatgattccccttggcaagatgtttcttatattattccaaagttatttcataccattattatgtaaatatgaagagtttttttctgtttataattgtttataaaacaatgacttttaaagatttagtgcttaacattttcccaagtgtgggaacattatttttagattgagtaggtaccttgtagcagtgtgctttgcattttctgatgtattacatgactgtttcttttgtaaagagaatcaactaggtatttaagactgataattttacaatttatatgcttcacatagcatgtcaacttttgactaagaattttgttttacttttttaacatgtgttaaacagagaaagggtccatgaaggaaagtgtatgagttgcatttgtaaaaatgagactttttcagtggaactctaaaccttgtgatgactactaacaaatgtaaaattatgagtgattaagaaaacattgctttgtggttatcactttaagttttgacacctagattatagtcttagtaatagcatccactggaaaaggtgaaaatgttttattcagcatttaacttacatttgtactttagagtatttttgtataaaatccatagatttattttacatttagagtatttacactatgataaagttgtaaataattttctaagacagtttttatatagtctacagttgtcctgatttcttattgaatttgttagactagttctcttgtcttgtgatctgtgtacaattttagtcactaagactttcctccaagaactaagccaacttgatgtgaaaagcacggctgtatataatggtgatgtcataataaagttgttttatcttttaagtaaaaaaaaaaaaaaaaaaaaa

SEQ ID NO: 2140 - DNA, 5794 bp, Homo sapiens
gcgggcgccggcaatcgagtggcttcctggccatggagaggagatctggacccgaggacgccagggactcctctccgtctccctggaccgctgtgtaggcacctgagttaacggacgctaagcggggtaggggaagtaacagtgtatcatgtatgccactgattccaggggacactcccctgctttcctccaacctcagaatggaaatagtcgtcacccatctggctatgttccagggaaggttgtcccattgcgtccccctcctcctccaaagagtcaagcttcagccaaatttacctccatcagacgagaagaccgggcaaccttcgcattctcacctgaagaacagcaagcccagagagaaagtcaaaagcaaaagagacacaaaaatactttcatttgttttgctattactagtttctcattttttattgcacttgcaatcattttaggaatatcctcaaaatatgctccagatgaaaattgcccagatcaaaatcctcgtctcaggaattgggatccaggacaagattctgcaaagcaagttgttatcaaggagggagatatgctccgtctgacctcagacgccaccgtgcattctatagtcattcaggatggaggactgcttgtatttggggacaataaagatggatccagaaatattactttgaggactcattacatcctgatccaggatggtggggcgcttcatattggagcagaaaaatgccgctataaatccaaagcgacaattaccttgtatggcaagtcagatgaaggtgaaagtatgccaacatttggcaaaaagtttattggtgtggaagctggcgggacactggagttacatggggcacggaaggcatcgtggacgttgttggcaaggaccctgaattcctcaggcttgccctttgggtcctatacctttgaaaaggacttttcccggggcctcaatgtgagggtcattgaccaagacacggccaaaattttggaaagtgagagatttgatacccatgaataccgcaatgagagcaggcggcttcaggagtttctgagattccaggatccaggtcggattgttgccatagctgtcggggattcagccgctaaaagtctcttacaaggaaccatccagatgatccaggaacggttgggaagtgaactgatccaaggactgggctacaggcaagcttgggctttagttggtgtcattgatggtggaagcacttcttgcaatgaatccgtgagaaactatgaaaatcatagcagtggcgggaaggctcttgcccaaagagaattttatactgtggatggccagaagttctctgtgacagcttatagtgaatggattgaaggcgtttctctttcaggattccgggtagaggttgtagatggagtgaagctaaatttgctagatgatgttagtagttggaaacctggagaccagattgtggtcgcaagcacagactattccatgtaccaagcagaggagttcactcttcttccctgttctgaatgcagccattttcaggtcaaagtcaaagaaacccctcagttcctgcacatgggtgagatcatagacggtgtagacatgagagctgaggttggaattcttacccggaatattgtgatccaaggagaagtggaggactcatgctacgcagaaaatcagtgccaattttttgattatgatacctttgggggacacattatgataatgaaaaattttacttcagtccatctttcttatgtggaattgaaacacatgggtcagcagcagatggggcgataccctgttcattttcacctgtgtggtgacgtggattataaaggaggatacagacatgcaacatttgtggacggcctgtctattcatcacagcttctcaaggtgcatcactgtgcatgggacaaatggcttgctaataaaagacaccattgggtttgacacactaggtcattgtttctttttggaagatggtattgaacagaggaatactttgttccacaatctgggactcctcaccaagccgggtactctcctgcccaccgataggaacaactccatgtgtaccaccatgcgagataaagtgtttggaaattacattcctgtgcctgctactgactgtatggctgtttcaactttctggattgctcatcccaacaataatctgattaataatgcagctgcaggctcacaggatgctggaatatggtatttattccacaaggaaccaactggggaatccagtggattgcagctcttggcaaaaccagaactcactccattgggtatattttataacaacagggtccattcaaattttaaggctggcttatttattgacaaaggtgtcaaaacaaccaactctagtgctgctgacccaagggaatacctctgtttggacaatagtgcaagatttcgacctcatcaggatgcaaaccccgaaaaaccacgtgttgctgctctaattgacaggctcattgcttttaaaaataatgataatggagcttgggtcagaggaggagatattatcgttcaaaattcagcatttgcagataatggaataggactgacctttgccagtgatggaagcttcccaagtgatgaaggttccagccaagaggtatctgaatctctctttgttggggagagcaggaattacggctttcagggtggtcagaacaagtatgtaggcactggaggaatagaccagaagcctcgaacattacccaggaacaggacgttcccaattagaggctttcagatttatgatgggcccattcatctcacaaggagcactttcaaaaaatatgtgccaactccagataggtacagcagtgcaattggcttcctcatgaagaattcctggcagataacccccaggaataatatctccctcgtgaagtttggtccacatgtctctctgaatgtcttttttggaaagcctggtccctggtttgaagattgtgagatggatggtgataagaactccatattccatgacattgatggctctgtgacaggatacaaggatgcttatgtgggaagaatggacaactacctgatccgccatccaagctgtgtaaatgtgtctaagtggaatgcagtgatctgcagtgggacctatgcacaggtctatgtacagacatggagcactcagaatctttctatgaccattacacgagatgagtatccgtccaaccctatggtgctccgaggtattaatcagaaggctgcctttccacagtaccagcctgtcgtcatgctggagaagggttataccatccactggaatgggccggcaccacggactacatttctatacctcgtcaacttcaacaagaatgactggattcgagttggcctttgctatccatcaaacacaagttttcaagttacctttggctatttgcagcggcagaatggctcattatccaaaatcgaagaatatgagcctgtgcattcactggaagaactgcaaagaaagcaatccgagaggaaattctattttgactccagcacggggttactgtttttgtatctcaaagccaaaagccacaggcatggccacagttactgttcatctcagggatgtgaaagagtcaagatccaagcagccacagactcaaaggacatcagtaactgcatggccaaagcatacccacagtactacagaaagccgtcagtggtcaagcggatgccggccatgctcactggactctgtcaaggctgtggcactcggcaggtggtgtttactagtgatcctcataaaagttacctccctgtgcaattccagtcacctgataaagcagaaacccagcgtggagacccgtctgttatttctgtcaatggcactgactttaccttccgaagtgcaggcgtcctcctccttgttgtggatccgtgcagcgttccattccgcttgacggaaaaaacggtttttcctcttgctgatgtcagtcgcattgaagagtatttaaaaacaggcatccctccaaggtccattgttctgttgagcacaagaggagaaataaagcagttaaacatttcacacttactagtacctctgggattagccaaaccagctcatctttatgacaaagggagtaccatatttttgggattcagtggaaactttaaaccatcatggactaagctatttaccagtcctgctggacagggccttggggtgcttgaacaattcatacctttgcagctggacgaatatggttgtcccagagccaccactgtccgcagaagagacctggaactgctaaagcaagcttcaaaagcacattagagactaactgtaacttaagtgctgggggaaaaaaaatgtgaactaacttatttaatttatggcattttaaaatgacactgttaacccaacggaaccattttccagtttgatacagaatggggagaaaagaaagcgtttgaaattattgcttggataccagcttcatgcaccttctagttgtacaaaatgttaaagacgttgtttgtatttgtaaggctggtgtattcagagagcagatctcttattcctcactttccacccccgtattttgtaatgaccatgagcaatgtttttactttttgtataatggggtggggtggagtgggggcttctgagagtcagcctgaggtctttagaggaccagctattgtagcaccttggatacttgaagtttaatgctcagttgggtcgggtggcagttgacttggtggctggcatgttcagcagtgcctggggccctgtttctgggcagcctttgaggattttctatgatattgaatgacagttttaagtggcaactcaggcccagctcatgcccttttttgcctggacatgtgctatttttattcacttatatatcaattacttgtaagggttaaactttcaaacaggaagtatattgggacaaaagggctcttggggattagatatccctttaatctgtgaccattgggcaaaaaattttcctgcagcaaaagtctgaggctgttgggaccatttttgcagctttaatccttagcctcttttgactgtatatttgtgtttaaaatgcagagctcaactgaatatttccttttttgttttgttttgttttgttttaagaagtaggttgttttcctgaaccgtaaacttgtatcattttaacttgcacaaaggaagtctgttcttggtattgctcttgcacttgggttttttgttattgttttgtgtggattttttaaagcttttctgttcaccctcctgccaggaaaatcccagaaagcttaatgataccccaaaatgattacacccagggaggaaaaaaaggagcgctttctagggtcagaatcgtggagagaatactcagaaatgaacctcaaaatgcctttacgttgttctaaacccccgacgcataaagtgtagaggagggatggccaagggtgggtggtagaaagtgtgttcaggctgacactggcaatgagtacagataatttcactttcctcttctaggggcaaaggctgatggcctctacctttgtatccaggagaaactgcagagcagccctgtgactttacaaaatatgctacctcaaagtgctaccgataaacctttctaattgtaagtgcccttactaagggcacatgtcttaatcaaagttagttttttgttttctggtttgtttttttttttttgtatattgatgaatgagatcttacctattaaatatattattggattatggttcctgaaggtcattagagtgtgtgtgtgtgtgtgtgtgtgtgtgtgtgttt

SEQ ID NO: 2141 - DNA, 5794 bp, Homo sapiens; identical to SEQ ID NO: 2140

SEQ ID NO: 2142 - DNA, 5765 bp, Homo sapiens
gcgggcgccggcaatcgagtggcttcctggccatggagaggagatctggacccgaggacgccagggactcctctccgtctccctggaccgctgtgtaggcacctgagttaacggacgctaagcggggtaggggaagtaacagtgtatcatgtatgccactgattccaggggacactcccctgctttcctccaacctcagaatggaaatagtcgtcacccatctggctatgttccagggaaggttgtcccattgcgtccccctcctcctccaaagagtcaagcttcagccaaatttacctccatcagacgagaagaccgggcaaccttcgcattctcacctgaagaacagcaagcccagagagaaagtcaaaagcaaaagagacacaaaaatactttcatttgttttgctattactagtttctcattttttattgcacttgcaatcattttaggaatatcctcaaaatatgctccagatgaaaattgcccagatcaaaatcctcgtctcaggaattgggatccaggacaagattctgcaaagcaagttgttatcaaggagggagatatgctccgtctgacctcagacgccaccgtgcattctatagtcattcaggatggaggactgcttgtatttggggacaataaagatggatccagaaatattactttgaggactcattacatcctgatccaggatggtggggcgcttcatattggagcagaaaaatgccgctataaatccaaagcgacaattaccttgtatggcaagtcagatgaagtttattggtgtggaagctggcgggacactggagttacatggggcacggaaggcatcgtggacgttgttggcaaggaccctgaattcctcaggcttgccctttgggtcctatacctttgaaaaggacttttcccggggcctcaatgtgagggtcattgaccaagacacggccaaaattttggaaagtgagagatttgatacccatgaataccgcaatgagagcaggcggcttcaggagtttctgagattccaggatccaggtcggattgttgccatagctgtcggggattcagccgctaaaagtctcttacaaggaaccatccagatgatccaggaacggttgggaagtgaactgatccaaggactgggctacaggcaagcttgggctttagttggtgtcattgatggtggaagcacttcttgcaatgaatccgtgagaaactatgaaaatcatagcagtggcgggaaggctcttgcccaaagagaattttatactgtggatggccagaagttctctgtgacagcttatagtgaatggattgaaggcgtttctctttcaggattccgggtagaggttgtagatggagtgaagctaaatttgctagatgatgttagtagttggaaacctggagaccagattgtggtcgcaagcacagactattccatgtaccaagcagaggagttcactcttcttccctgttctgaatgcagccattttcaggtcaaagtcaaagaaacccctcagttcctgcacatgggtgagatcatagacggtgtagacatgagagctgaggttggaattcttacccggaatattgtgatccaaggagaagtggaggactcatgctacgcagaaaatcagtgccaattttttgattatgatacctttgggggacacattatgataatgaaaaattttacttcagtccatctttcttatgtggaattgaaacacatgggtcagcagcagatggggcgataccctgttcattttcacctgtgtggtgacgtggattataaaggaggatacagacatgcaacatttgtggacggcctgtctattcatcacagcttctcaaggtgcatcactgtgcatgggacaaatggcttgctaataaaagacaccattgggtttgacacactaggtcattgtttctttttggaagatggtattgaacagaggaatactttgttccacaatctgggactcctcaccaagccgggtactctcctgcccaccgataggaacaactccatgtgtaccaccatgcgagataaagtgtttggaaattacattcctgtgcctgctactgactgtatggctgtttcaactttctggattgctcatcccaacaataatctgattaataatgcagctgcaggctcacaggatgctggaatatggtatttattccacaaggaaccaactggggaatccagtggattgcagctcttggcaaaaccagaactcactccattgggtatattttataacaacagggtccattcaaattttaaggctggcttatttattgacaaaggtgtcaaaacaaccaactctagtgctgctgacccaagggaatacctctgtttggacaatagtgcaagatttcgacctcatcaggatgcaaaccccgaaaaaccacgtgttgctgctctaattgacaggctcattgcttttaaaaataatgataatggagcttgggtcagaggaggagatattatcgttcaaaattcagcatttgcagataatggaataggactgacctttgccagtgatggaagcttcccaagtgatgaaggttccagccaagaggtatctgaatctctctttgttggggagagcaggaattacggctttcagggtggtcagaacaagtatgtaggcactggaggaatagaccagaagcctcgaacattacccaggaacaggacgttcccaattagaggctttcagatttatgatgggcccattcatctcacaaggagcactttcaaaaaatatgtgccaactccagataggtacagcagtgcaattggcttcctcatgaagaattcctggcagataacccccaggaataatatctccctcgtgaagtttggtccacatgtctctctgaatgtcttttttggaaagcctggtccctggtttgaagattgtgagatggatggtgataagaactccatattccatgacattgatggctctgtgacaggatacaaggatgcttatgtgggaagaatggacaactacctgatccgccatccaagctgtgtaaatgtgtctaagtggaatgcagtgatctgcagtgggacctatgcacaggtctatgtacagacatggagcactcagaatctttctatgaccattacacgagatgagtatccgtccaaccctatggtgctccgaggtattaatcagaaggctgcctttccacagtaccagcctgtcgtcatgctggagaagggttataccatccactggaatgggccggcaccacggactacatttctatacctcgtcaacttcaacaagaatgactggattcgagttggcctttgctatccatcaaacacaagttttcaagttacctttggctatttgcagcggcagaatggctcattatccaaaatcgaagaatatgagcctgtgcattcactggaagaactgcaaagaaagcaatccgagaggaaattctattttgactccagcacggggttactgtttttgtatctcaaagccaaaagccacaggcatggccacagttactgttcatctcagggatgtgaaagagtcaagatccaagcagccacagactcaaaggacatcagtaactgcatggccaaagcatacccacagtactacagaaagccgtcagtggtcaagcggatgccggccatgctcactggactctgtcaaggctgtggcactcggcaggtggtgtttactagtgatcctcataaaagttacctccctgtgcaattccagtcacctgataaagcagaaacccagcgtggagacccgtctgttatttctgtcaatggcactgactttaccttccgaagtgcaggcgtcctcctccttgttgtggatccgtgcagcgttccattccgcttgacggaaaaaacggtttttcctcttgctgatgtcagtcgcattgaagagtatttaaaaacaggcatccctccaaggtccattgttctgttgagcacaagaggagaaataaagcagttaaacatttcacacttactagtacctctgggattagccaaaccagctcatctttatgacaaagggagtaccatatttttgggattcagtggaaactttaaaccatcatggactaagctatttaccagtcctgctggacagggccttggggtgcttgaacaattcatacctttgcagctggacgaatatggttgtcccagagccaccactgtccgcagaagagacctggaactgctaaagcaagcttcaaaagcacattagagactaactgtaacttaagtgctgggggaaaaaaaatgtgaactaacttatttaatttatggcattttaaaatgacactgttaacccaacggaaccattttccagtttgatacagaatggggagaaaagaaagcgtttgaaattattgcttggataccagcttcatgcaccttctagttgtacaaaatgttaaagacgttgtttgtatttgtaaggctggtgtattcagagagcagatctcttattcctcactttccacccccgtattttgtaatgaccatgagcaatgtttttactttttgtataatggggtggggtggagtgggggcttctgagagtcagcctgaggtctttagaggaccagctattgtagcaccttggatacttgaagtttaatgctcagttgggtcgggtggcagttgacttggtggctggcatgttcagcagtgcctggggccctgtttctgggcagcctttgaggattttctatgatattgaatgacagttttaagtggcaactcaggcccagctcatgcccttttttgcctggacatgtgctatttttattcacttatatatcaattacttgtaagggttaaactttcaaacaggaagtatattgggacaaaagggctcttggggattagatatccctttaatctgtgaccattgggcaaaaaattttcctgcagcaaaagtctgaggctgttgggaccatttttgcagctttaatccttagcctcttttgactgtatatttgtgtttaaaatgcagagctcaactgaatatttccttttttgttttgttttgttttgttttaagaagtaggttgttttcctgaaccgtaaacttgtatcattttaacttgcacaaaggaagtctgttcttggtattgctcttgcacttgggttttttgttattgttttgtgtggattttttaaagcttttctgttcaccctcctgccaggaaaatcccagaaagcttaatgataccccaaaatgattacacccagggaggaaaaaaaggagcgctttctagggtcagaatcgtggagagaatactcagaaatgaacctcaaaatgcctttacgttgttctaaacccccgacgcataaagtgtagaggagggatggccaagggtgggtggtagaaagtgtgttcaggctgacactggcaatgagtacagataatttcactttcctcttctaggggcaaaggctgatggcctctacctttgtatccaggagaaactgcagagcagccctgtgactttacaaaatatgctacctcaaagtgctaccgataaacctttctaattgtaagtgcccttactaagggcacatgtcttaatcaaagttagttttttgttttctggtttgtttttttttttttgtatattgatgaatgagatcttacctattaaatatattattggattatggttcctgaaggtcattagagtgtgtgtgtgtgtgtgtgtgtgtgtgtgtgttt

SEQ ID NO: 2143 - DNA, 2436 bp, Homo sapiens
cccagtcgcgccgccagcgggctgagggtaggaagtagccgctccgagtggaggcgactgggggctgaagagcgcgccgccctctcgtcccattttgtaggtgtgtgatcctgtaaaattaaatcttccaagatgatctggtatatattaattataggaattctgcttccccagtctttggctcatccaggcttttttacttcaattggtcagatgactgatttgatccatactgagaaagatctggtgacttctctgaaagattatattaaggcagaagaggacaagttagaacaaataaaaaaatgggcagagaagttagatcggctaactagtacagcgacaaaagatccagaaggatttgttgggcatccagtaaatgcattcaaattaatgaaacgtctgaatactgagtggagtgagttggagaatctggtccttaaggatatgtcagatggctttatctctaacctaaccattcagagacagtactttcctaatgatgaagatcaggttggggcagccaaagctctgttacgtctccaggatacctacaatttggatacagataccatctcaaagggtaatcttccaggagtgaaacacaaatcttttctaacggctgaggactgctttgagttgggcaaagtggcctatacagaagcagattattaccatacggaactgtggatggaacaagccctaaggcaactggatgaaggcgagatttctaccatagataaagtctctgttctagattatttgagctatgcggtatatcagcagggagacctggataaggcacttttgctcacaaagaagcttcttgaactagatcctgaacatcagagagctaatggtaacttaaaatattttgagtatataatggctaaagaaaaagatgtcaataagtctgcttcagatgaccaatctgatcagaaaactacaccaaagaaaaaaggggttgctgtggattacctgccagagagacagaagtacgaaatgctgtgccgtggggagggtatcaaaatgacccctcggagacagaaaaaactcttttgccgctaccatgatggaaaccgtaatcctaaatttattctggctccagctaaacaggaggatgaatgggacaagcctcgtattattcgcttccatgatattatttctgatgcagaaattgaaatcgtcaaagacctagcaaaaccaaggctgaggcgagccaccatttcaaacccaataacaggagacttggagacggtacattacagaattagcaaaagtgcctggctctctggctatgaaaatcctgtggtgtctcgaattaatatgagaatacaagatctaacaggactagatgtttccacagcagaggaattacaggtagcaaattatggagttggaggacagtatgaaccccattttgactttgcacggaaagatgagccagatgctttcaaagagctggggacaggaaatagaattgctacatggctgttttatatgagtgatgtgtctgcaggaggagccactgtttttcctgaagttggagctagtgtttggcccaaaaaaggaactgctgttttctggtataatctgtttgccagtggagaaggagattatagtacacggcatgcagcctgtccagtgctagttggcaacaaatgggtatccaataaatggctccatgaacgtggacaagaatttcgaagaccttgtacgttgtcagaattggaatgacaaacaggcttccctttttctcctattgttgtactcttatgtgtctgatatacacatttcctagtcttaactttcaggagtttacaattgactaacactccatgattgattcagtcatgaacctcatcccatgtttcatctgtggacaattgcttactttgtgggttcttttaaaagtaacacgaaatcatcatattgcataaaaccttaaagttctgttggtatcacagaagacaaggcagagtttaaagtgaggaattttatatttaaagaactttttggttggataaaaacataatttgagcatccagttttagtatttcactacatctcagttggtgggttctgttttctggatctgaagactagtaataaactaggacactaactgggttccatgtgattgccctttcatatgatcttctaagttgatttttttcctcccaagtcttttttaaagaaagtatactgtattttaccaaccccctctcttttcttttagctcctctgtggtgaattaaacgtacttgagttaaaatattttgggccttcttaactaaaatgctcaccacttagcctgtttttttatcccttttttaaaatgacagatgattttgttcaggaattttgctgtttttcttagtgctaataccttgcctcttattcctgctacagcagggtggtaatattggcattctg

SEQ ID NO: 2144 - DNA, 2436 bp, Homo sapiens
cccagtcgcgccgccagcgggctgagggtaggaagtagccgctccgagtggaggcgactgggggctgaagagcgcgccgccctctcgtcccattttgtaggtgtgtgatcctgtaaaattaaatcttccaagatgatctggtatatattaattataggaattctgcttccccagtctttggctcatccaggcttttttacttcaattggtcagatgactgatttgatccatactgagaaagatctggtgacttctctgaaagattatattaaggcagaagaggacaagttagaacaaataaaaaaatgggcagagaagttagatcggctaactagtacagcgacaaaagatccagaaggatttgttgggcatccagtaaatgcattcaaattaatgaaacgtctgaatactgagtggagtgagttggagaatctggtccttaaggatatgtcagatggctttatctctaacctaaccattcagagacagtactttcctaatgatgaagatcaggttggggcagccaaagctctgttacgtctccaggatacctacaatttggatacagataccatctcaaagggtaatcttccaggagtgaaacacaaatcttttctaacggctgaggactgctttgagttgggcaaagtggcctatacagaagcagattattaccatacggaactgtggatggaacaagccctaaggcaactggatgaaggcgagatttctaccatagataaagtctctgttctagattatttgagctatgcggtatatcagcagggagacctggataaggcacttttgctcacaaagaagcttcttgaactagatcctgaacatcagagagctaatggtaacttaaaatattttgagtatataatggctaaagaaaaagatgtcaataagtctgcttcagatgaccaatctgatcagaaaactacaccaaagaaaaaaggggttgctgtggattacctgccagagagacagaagtacgaaatgctgtgccgtggggagggtatcaaaatgacccctcggagacagaaaaaactcttttgccgctaccatgatggaaaccgtaatcctaaatttattctggctccagctaaacaggaggatgaatgggacaagcctcgtattattcgcttccatgatattatttctgatgcagaaattgaaatcgtcaaagacctagcaaaaccaaggctgagccgagctacagtacatgaccctgagactggaaaattgaccacagcacagtacagagtatctaagagtgcctggctctctggctatgaaaatcctgtggtgtctcgaattaatatgagaatacaagatctaacaggactagatgtttccacagcagaggaattacaggtagcaaattatggagttggaggacagtatgaaccccattttgactttgcacggaaagatgagccagatgctttcaaagagctggggacaggaaatagaattgctacatggctgttttatatgagtgatgtgtctgcaggaggagccactgtttttcctgaagttggagctagtgtttggcccaaaaaaggaactgctgttttctggtataatctgtttgccagtggagaaggagattatagtacacggcatgcagcctgtccagtgctagttggcaacaaatgggtatccaataaatggctccatgaacgtggacaagaatttcgaagaccttgtacgttgtcagaattggaatgacaaacaggcttccctttttctcctattgttgtactcttatgtgtctgatatacacatttcctagtcttaactttcaggagtttacaattgactaacactccatgattgattcagtcatgaacctcatcccatgtttcatctgtggacaattgcttactttgtgggttcttttaaaagtaacacgaaatcatcatattgcataaaaccttaaagttctgttggtatcacagaagacaaggcagagtttaaagtgaggaattttatatttaaagaactttttggttggataaaaacataatttgagcatccagttttagtatttcactacatctcagttggtgggttctgttttctggatctgaagactagtaataaactaggacactaactgggttccatgtgattgccctttcatatgatcttctaagttgatttttttcctcccaagtcttttttaaagaaagtatactgtattttaccaaccccctctcttttcttttagctcctctgtggtgaattaaacgtacttgagttaaaatattttgggccttcttaactaaaatgctcaccacttagcctgtttttttatcccttttttaaaatgacagatgattttgttcaggaattttgctgtttttcttagtgctaataccttgcctcttattcctgctacagcagggtggtaatattggcattctg

SEQ ID NO: 2145 - DNA, 2436 bp, Homo sapiens; identical to SEQ ID NO: 2143

SEQ ID NO: 2146 - DNA, 2769 bp, Homo sapiens
ggcccagtcgcgccgccagcgggctgagggtaggaagtacccgctctgagtggaggcgactggggactgaagagcgcgcagccctctcgtcccactttccaggtgtgtgatcctgtaaaattaagtcttccaagatgatctggtatatattaattataggaattctgcttccccagtctttggctcatccaggcttttttacttcaattggtcagatgactgatttgatccatactgagaaagatctggtgacttctctgaaagattatattaaggcagaagaggacaagttagaacaaataaaaaaatgggcagagaagttagatcggctaactagtacagcgacaaaagatccagaaggatttgttgggcatccagtaaatgcattcaaattaatgaaacgtctgaatactgagtggagtgagttggagaatctggtccttaaggatatgtcagatggctttatctctaacctaaccattcagagacagtactttcctaatgatgaagatcaggttggggcagccaaagctctgttacgtctccaggatacctacaatttggatacagataccatctcaaagggtaatcttccaggagtgaaacacaaatcttttctaacagctgaggactgctttgagttgggcaaagtggcctatacagaagcagattattaccatacagaactgtggatggaacaagccctaaggcaactggatgaaggcgagatttctaccatagataaagtctctgttctagattatttgagctatgcggtatatcagcagggagacctggataaggcacttttgctcacaaagaagcttcttgaactagatcctgaacatcagagagctaatggtaacttaaaatattttgagtatataatggctaaagaaaaagatgtcaataagtctgcttcagatgaccaatctgatcagaaaactacaccaaagaaaaaaggggttgctgtggattacctgccagagagacagaagtacgaaatgctgtgccgtggggagggtatcaaaatgacccctcggagacagaaaaaactcttttgccgctaccatgatggaaaccgtaatcctaaatttattctggctccagctaaacaggaggatgaatgggacaagcctcgtattattcgcttccatgatattatttctgatgcagaaattgaaattgtcaaagacctagcaaaaccaaggctgaggcgagccaccatttcaaacccaataacaggagacttggagacggtacattacagaattagcaaaagtgcctggctctctggctatgaaaaccctgtggtgtctcgaattaatatgagaatacaagatctaacaggactagatgtttccacagcagaggaattacaggtagcaaattatggagttggaggacagtatgaaccccattttgactttgcacggaaagatgagccagatgctttcaaagagctggggacaggaaatagaattgctacatggctgttttatatgagtgatgtgtctgcaggaggagccactgtttttcctgaagttggagctagtgtttggcccaaaaaaggaactgctgttttctggtataatctgtttgccagtggagaaggagattatagtacacggcatgcagcctgtccagtgctagttggcaacaaatgggtatccaataaatggctccatgaacgtggacaagaatttcgaagaccttgcaccttgtcagaattggaatgacaaacaggcttccctttctctcctattgttgtactcttatgtgtctgatacacacatttcctagtcttaactttcaggagtttacagttgactaacactccatgattgattcagtcatgaacctcatgccatgtttcatctgtggacaatcgtttactttatgggttattttaaaagtaacatgaaatcaccatattgcgtatgtaaaaccttaaagttctgttggtatcacagaagataaggcagagtttaaagtgaggaattttatatttaaagaactttttggttggataaaaacataatttgagcatccaattttagtatttcactacatctcagttggtgggtgttaagctagaatgggccgtgtgataggaaacaaatgccttacagatgtgtctaggtgttctgtttacctagtgtcttactctgttttctggatctgaagactagtaataaactaggacactaactgggttccatgtgatccatgtgatgtttgccctttcatatgatctcctaagttgattttttttcctcccaagtcctttttaaagaaagtatagtgtattttaccaaccccctctcttttctcttagctcttctgtggtgaattaaacctacttgagttaaaatatttctttttttttttttttaacagaaagtcctgcataacaacactgggccttcttaactaaaatgctcaccacttagtctgttttttaatcccttttttaaaatgacagatgattttgtccagaaattttgctgtttttcttagtgctaataccttgcctcttattcctgctacagcagggtggtaatattggcattctgattaaatactgtgccttaggagactggaagtttaaaaatgtagaagtcctttcagtgatgagggaattgattttttttttaaagtctttttcttagaaagccaaaatgtttgtttttttaaaattctgaaatgtgtgtgacaacaatgacctatttatgatcttaaatcttttttaaaaaaaaaaaaaaaaaa

SEQ ID NO: 2147 - DNA, 2436 bp, Homo sapiens; identical to SEQ ID NO: 2144

SEQ ID NO: 2148 - DNA, 16382 bp, Homo sapiens; identical to SEQ ID NO: 1612

SEQ ID NO: 2149 - DNA, 3147 bp, Homo sapiens
catcggtgttcgctgatgtccagtctatggagtcagttggtaccggtggcggcgcggaggcagaaggcggtgtccgagtaggggcctctgccccaccaggatgttaccggcctgtaatcccagcgaccgccaggagtggcagaatttagtgacatttggaagcttttcaaacgtggttccctgtagtcatccatatattggtaccctgagtcaagtaaagttgtactccacaaatgttcagaaagaaggacagggatcacaaacactcagagtggaaaaagtaccatcatttgaaacagcagaaggtataggcgcagaactcaaagctccacttaagcaagaacctctccaagtaagagttaaagcagtccttaagaaaagggagtatggatcaaagtacactcagaataatttcatcactggagtcagagcgataaatgagttctacctcaaatccagtgatctagaacaacttcgaaaaatcagacgacgaagtccccatgaagatactgagtcttttactgtatacttgagatcagatgtggaagcaaaatctttggaagtttggggaagccctgaagctcttgccagagagaaaaaattgcgtaaggaagcagaaatagaatacagagaaaggctatttagaaaccaaaaaatattaagagaatacagagatttcttgggaaataccaagccacgctccagaacagcatcagtgttttttaagggaccaggaaaagtggtgatggttgcaatttgcatcaatggattaaactgcttctttaaatttcttgcctggatttataccggttcagcaagtatgttctcagaagctatacactcattatctgatacttgtaatcagggtttactagcattgggcatcagtaagtctgttcaaacaccagatccttctcatccgtacggattttcaaatatgcgctatatttcttcgctaattagtggtgttggtattttcatgatgggtgcaggactatcttggtaccatggagtcatgggattgcttcatcctcaaccaatagaatcccttctatgggcatattgtattttagcaggatcattagtatctgtaggtgcaacacttcttgttgctgtaaatgaacttcgtaggaatgctcgggctaaaggaatgtcattttacaagtatgtaatggaaagtcgtgatcctagtacaaatgtgatattattggaggatactgctgcagtcttgggagttataatagcagccacttgcatgggccttacttctataacaggcaatccactgtatgacagcctaggttctttgggtgtgggcaccttattaggcatggtctcagcattcctcatctacactaacacagaagcactcttagggcggtccatccagccagaacaagtacaacggctcactgaactcctggagaatgacccatcagtaagggcaattcatgatgttaaagccacagatctgggattaggtaaagtaagatttaaggcagaagtagattttgatgggcgagttgttacaagatcatatttggaaaaacaagattttgaccaaatgttacaagaaattcaagaagtgaaaactcctgaagaactagagacctttatgcttaaacatggagaaaatattattgatactttaggagctgaagtagatagacttgagaaggaactgaaaaaacgaaatcctgaagttcgacatgtagatttggagatactgtgagtttgatggaatgaatcacctgggtggggaccttggaaacaagtttgtccgtccactctacaaagtttcctcctctcctacactgaaagactcagtgccatgcagaagccttttttttaagatgaaggaaatattttatgtaaagagcaactcagcaggacacagaactaaacctactacttacatctaacagacacactacaagttgaatcaatttgaaaatcatgtttttatgcttccatagggaacattttggttatttaaattgttcataatgtcccatatttcacctgttcagtgtatactgtactttgcaatcatctttccttttttcacattggtaaaaataagtggcatccataggatcatgatttttaatttgttgcctctgaagatttcactccatcaagatctgccaatcttcaatattctggctaaatcttggtatgtggtttttaaacagtcactccgtttcaaagtctgtctttccttatagaatgtggaaattatttctccataccttgtgattttgacctgagtgctaagagaatcactctccttacctagttatctacaaatgttcattccagaaatgtttagttactgaattgaatgaagacatctcagtacactcttttaggtcatagtagttgccattttgtaaaatttcttttttcttctttgcttttttccccttatttggtttaatttttctaatgttaggagatatagtcctagatatttccatgggccagtgtgatgacttttttttaaatgaggttcagtaccataatgtttatttactggaagataatgcatttataagcattttaaaattctgtaaagtgggttagaaatatttataattttacaggcaggacagcatttgacttttatttaaaaggcggcactacttatgtaaatctgagctgtgggatatttcttgctttaagagagagacagaatctctcactgaaactcatggtcatgattttgtataatatagttcatactgtgtctgtgagtttcttcaattacaaatgggcatttagtatagttatattgactataacatgtaagtaaatagctttctactgaccctaagttatcaaggtgaaaaaaaaacatgcaattcagtaattgaaaatgtggtgaaaagctgcagctgtcatcatcaaaacaactcataacatactttaaaatgttcaggtagcagtgagcattgttcatatgagaatggcggctgggtgatctctttgctgaattaatgagttcttaacatgtggacccaactgcctgtgtgagatctgtgtcttaaaacttactggaatggaaatctatgaattattgcaaattgtaatgctggaaacaaaaaataaatccttggttaaagggaaaaaaaaaaaaaaaaaaaa

SEQ ID NO: 2150 - DNA, 2482 bp, Homo sapiens
tgagagtcctctagacaggcgctcctcgcagcaccgtagtgcgcttgcgctgagcagcccgcgagggcggaagtgggagctgcgaccgcgctccctgtgaggtgggcaagcggcgaaatggcgccctccgggagtcttgcagttcccctggcagtcctggtgctgttgctttggggtgctccctggacgcacgggcggcggagcaacgttcgcgtcatcacggacgagaactggagagaactgctggaaggagactggatgatagaattttatgccccgtggtgccctgcttgtcaaaatcttcaaccggaatgggaaagttttgctgaatggggagaagatcttgaggttaatattgcgaaagtagatgtcacagagcagccaggactgagtggacggtttatcataactgctcttcctactatttatcattgtaaagatggtgaatttaggcgctatcagggtccaaggactaagaaggacttcataaactttataagtgataaagagtggaagagtattgagcccgtttcatcatggtttggtccaggttctgttctgatgagtagtatgtcagcactctttcagctatctatgtggatcaggacttgccataactactttattgaagaccttggattgccagtgtggggatcatatactgtttttgctttagcaactctgttttccggactgttattaggactctgtatgatatttgtggcagattgcctttgtccttcaaaaaggcgcagaccacagccatacccatacccttcaaaaaaattattatcagaatctgcacaacctttgaaaaaagtggaggaggaacaagaggcggatgaagaagatgtttcagaagaagaagctgaaagtaaagaaggaacaaacaaagactttccacagaatgccataagacaacgctctctgggtccatcattggccacagataaatcctagttaaattttatagttatcttaatattatgattttgataaaaacagaagattgatcattttgtttggtttgaagtgaactgtgacttttttgaatattgcagggttcagtctagattgtcattaaattgaagagtctacattcagaacataaaagcactaggtatacaagtttgaaatatgatttaagcacagtatgatggtttaaatagttctctaatttttgaaaaatcgtgccaagcaataagatttatgtatatttgtttaataataacctatttcaagtctgagttttgaaaatttacatttcccaagtattgcattattgaggtatttaagaagattattttagagaaaaatatttctcatttgatataatttttctctgtttcactgtgtgaaaaaaagaagatatttcccataaatgggaagtttgcccattgtctcaagaaatgtgtatttcagtgacaatttcgtggtctttttagaggtatattccaaaatttccttgtatttttaggttatgcaactaataaaaactaccttacattaattaattacagttttctacacatggtaatacaggatatgctactgatttaggaagtttttaagttcatggtattctcttgattccaacaaagtttgattttctcttgtatttttcttacttactatgggttacattttttatttttcaaattggatgataatttcttggaaacattttttatgttttagtaaacagtatttttttgttgtttcaaactgaagtttactgagagatccatcaaattgaacaatctgttgtaatttaaaattttggccacttttttcagattttacatcattcttgctgaacttcaacttgaaattgtttttttttttttttctttttggatgtgaaggtgaacattcctgatttttgtctgatgtgaaaaagccttggtattttacattttgaaaattcaaagaagcttaatataaaagtttgcattctactcaggaaaaagcatcttcttgtatatgtcttaaatgtatttttgtcctcatatacagaaagttcttaattgattttacagtctgtaatgcttgatgttttaaaataataacatttttatattttttaaaagacaaacttcatattatcctgtgttctttcctgactggtaatattgtgtgggatttcacaggtaaaagtcagtaggatggaacattttagtgtatttttactccttaaagagctagaatacatagttttcaccttaaaagaagggggaaaatcataaatacaatgaatcaactgaccattacgtagtagacaatttctgtaatgtccccttctttctaggctctgttgctgtgtgaatccattagatttacagtatcgtaatatacaagttttctttaaagccctctcctttagaatttaaaatattgtaccattgaagagtttggatgtgtaacttgtgatgccttagaaaaatatcctaagcacaaaataaacctttctaaccacttcatt

SEQ ID NO: 2151 - DNA, 1112 bp, Homo sapiens
tgagagtcctctagacaggcgctcctcgcagcaccgtagtgcgcttgcgctgagcagcccgcgagggcggaagtgggagctgcgaccgcgctccctgtgaggtgggcaagcggcgaaatggcgccctccgggagtcttgcagttcccctggcagtcctggtgctgttgctttggggtgctccctggacgcacgggcggcggagcaacgttcgcgtcatcacggacgagaactggagagaactgctggaaggagactggatgatagaattttatgccccgtggtgccctgcttgtcaaaatcttcaaccggaatgggaaagttttgctgaatggggagaagatcttgaggttaatattgcgaaagtagatgtcacagagcagccaggactgagtggacggtttatcataactgctcttcctactatttatcattgtaaagatggtgaatttaggcgctatcagggtccaaggactaagaaggacttcataaactttataagtgataaagagtggaagagtattgagcccgtttcatcatggtttggtccaggttctgttctgatgagtagtatgtcagcactctttcagctatctatgtggatcaggacttgccataactactttattgaagaccttggattgccagtgtggggatcatatactgtttttgctttagcaactctgttttccggactgttattaggactctgtatgatatttgtggcagattgcctttgtccttcaaaaaggcgcagaccacagccgtacccatacccttcaaaaaaattattatcagaatctgcacaacctttgaaaaaagtggaggaggaacaagaggcggatgaagaagatgtttcagaagaagaagctgaaagtaaagaaggaacaaacaaagactttccacagaatgccataagacaacgctctctgggtccatcattggccacagataaatcctagttaaattttatagttatcttaatattatgattttgataaaaacagaagattgatcattttgtttggtttgaagtgaactgtgacttttttgaatattgcagggttcagtctagattgtcattaaattgaagagtctacattcagaacataaa

SEQ ID NO: 2152 - DNA, 4502 bp, Homo sapiens
acagaggttcaagaggtgccaacgtggctataactggaaaactggatccgaaatcgaccagtaaactgggtagctcggtctacgccccgcccaccacccttgctagccaatagccttcacaactcttctgccactcccgcccattccagtgctgtgccgctgctttttcttccactcggatctcttgagcgcccttagcccgctgtatacgcgcccctcctcggcttcagtaggcaagagggccatctgcccttctttcctgaaggtagaggggacaacaccagctacgacggggactccagaagtccatctcccgaacagcagcggggcgaaaagaaagaaaaagggtttccgaagactcctactcacacccacgctttcccttaacccggaagtgatttccgcccctcctctccctcttcggttgatactggaggagaaggacggccaggtctggcccggcatgccctgggcttccggtgacctctggcccttttctgtcgtccgctctctctgcctagcgtgctcgctcgctcattgctttccttccctccctcggtcttccttcgcacgctgtttggtgattgtggcgctcgcgacagacagggaggcggtggcagaggacacttgtcatggccgcctctaaacctgtggaggcagcggtggtcgcagccgctgtaccgagctccgggagtggggtgggcggcggcgggactgcgggcccgggcacgggggggctgccgcgatggcagctggctctggcggtcggggcacccctgctgctgggcgcgggtgccatatacctgtggagtcggcagcaacggcgccgggaggccagaggccggggcgacgccagcggcctgaagcgcaacagcgaacggaagaccccggagggcagggccagtccggccccgggcagcggacaccctgaaggtcccggtgctcacttggacatgaactctcttgatagagcccaagcagccaagaataaaggcaataaatattttaaagcaggaaaatatgaacaagctattcagtgctatactgaggctattagcttgtgccctacagagaagaatgttgacctttctacattttatcaaaacagagctgctgcctttgaacagttgcaaaaatggaaagaagtggcacaagactgtacaaaagctgttgaacttaatcccaaatatgtgaaagctctctttagacgtgcaaaagcccatgagaagctagacaataagaaggaatgtttagaagatgtcactgctgtgtgtatattagaagggttccaaaatcaacaaagcatgctgttagccgataaagttcttaaactccttggaaaagagaaagccaaagaaaaatataagaatcgtgaacctctgatgccatctccacagtttatcaaatcttacttcagttctttcacggatgatatcatttcccagcccatgcttaaaggagagaaatctgatgaagataaagacaaggaaggggaggctttagaagtgaaagaaaattctggatacttaaaggccaaacagtatatggaagaagaaaactacgataaaatcataagtgaatgctcaaaagaaatagatgctgaaggcaaatacatggcagaagcattgctactacgagctaccttctacctgcttattggcaatgccaatgcagccaaaccagatttagataaagtcatcagtttgaaagaagctaatgtgaagcttcgagcaaatgctctcatcaaaagaggcagcatgtacatgcaacagcagcagcctttgctgtccactcaagattttaacatggctgctgacatcgatcctcagaatgcagatgtttatcaccaccgaggacagctgaaaatactccttgatcaagttgaagaagcagtggcagattttgatgaatgtattaggttaagacctgagtctgctctggcacaagcacagaaatgttttgcattgtaccgccaggcatatacgggaaacaactcttcacaaatccaagcagctatgaaaggttttgaagaggtcataaagaaatttccaaggtgtgccgaaggctatgcactatacgcccaggcattaacagatcaacaacagtttggtaaagctgatgaaatgtatgataaatgtattgatttggaaccagataatgctacaacatatgttcataaaggtttacttcaacttcagtggaagcaagatctggatagaggtttggaacttatcagcaaggctattgaaattgacaataaatgtgattttgcctatgaaaccatgggaactattgaagtacaaagaggaaacatggagaaagccattgacatgttcaacaaagctattaacctggccaaatcggaaatggagatggcccatctgtattcactttgcgatgccgcccatgcccagacagaagttgcaaagaaatacggattaaaaccaccaacattataaaacagggggaaagcagactgaccctctttttaaaagtttaccccctcttcaactgaaccctaaagacactgtcatgaactgtgttgaatggtggaaatcagtatttctgtttgtggtgttgttatttgttacatctgtttcatgtctaggtgttgtgggtgtggctgttgaaggaagtttgcagtcttgcagcttttattccctgtgcaacaaaagattagaacatgttaaagggatttttaaataaagttgcaaagagtacaaatgataattggccatgcaaataaaaactgatttgttgattttttttttaaggggggttggcagttgattatgttctggatgattccgtctatatatgtgtgaataatgtaagtattttacagcatgttgatttttaaattaacgtagtaaatgctgtaaaatagatttatattcagttaaccgctttcagttgattttttgaaagaaacaaaggttaaatgggggattaaagtaaaattgagagaccctttaaaccattgtcagcatgcacaatgcctctgattctgcagttttagaaacttggtggcacttattaatcctcttggcccctttccactctaatggatagtgtacattcttcttaaagtccacaacagcagattttcttgcagtaaattatgcagatgcaaaatattctaattgatatatgtgttggaagactgagtattgatgggggagtggaccagacaaagaggtaagatgaaacagtagtgtgtttataattgtctgtgactattttctataataattagtactatttaatggtgagcttttaaaaatgtaggatagagggtacagtggcactgtatatactatttatagtctcagctactagggaggctgaggcaagaggcttgagaccaggagctcgaggctgtaatgtgccatgatgattgcacctgcgaatagccactgcactccagcctgggcaatatagcaagaccccatcctttaaaaaattttagaacttttttaaaatcaaagtgcagattgcttgtatgtaaaacccaaataaaggtagagtaagtgtgatatatgggagtattaaaatagcttaaaatttctcgtgaaggacatgtggctaaaggtttagtgctttaactatggctacatgtgcttaaggaattttgagccacttatttttgaagatgctgaggacatgtagagtgctttttgtagtgagctaaccttgatctctaaggactaactacccaggtccaggtcttcactaggggtactgacagtgtttaagctttactccacctccttacttagaaatcactttacgatttatttccattttccacttttatagaccatccttttgcttatatgctagatttttctggtgagggaagggttgtgttcttcaggggtcttttgttttgaaatactcaggatggggagaggtttatttaagaacgaattataattatggtttacactgttgggagtaaaggagcatttttacaccccttaagggtgcttaattctgttgaaaccaaaaagatttgtctacaaatgctatcttttttagaaactattagaaatgactccctttcaaagtcaatctttggaaaatattgaggaggtcactaattagttggtgcagttaatataattcaagatgatttggatgatgggaagtttgagaccgctgcattttgtttttaaattatgcaccttctgataacccccaaatacagaaatgttctacatctctgaatgacctctgactttaaaaaagtttttatttgcatggctgtatttacattaacactgacattttcttctactcttctcccttctttcatcttggggttgggtagagaaacacaaaggaaactgaagcatgtgccattctatactgtcattccaaattctcatggactattgcctgttgtgaaaatgtttgaaactgcactgaaagctgcatctgtctgtatctttcttttgtaaatgacctcacatgtaaattcaccaaataaatattacatt

SEQ ID NO: 2153 - DNA, 2236 bp, Homo sapiens
ctagcgtgctcgctcgctcattgctttccttccctccctcggtcttccttcgcacgctgtttggtgattgtggcgctcgcgacagacagggaggcggtggcagaggacacttgtcatggccgcctctaaacctgtggaggcagcggtggtcgcagccgctgtaccgagctccgggagtggggtgggcggcggcgggactgcgggcccgggcacgggggggctgccgcgatggcagctggctctggcggtcggggcacccctgctgctgggcgcgggtgccatatacctgtggagtcggcagcaacggcgccgggaggccagaggccggggcgacgccagcggcctgaagcgcaacagcgaacggaagaccccggagggcagggccagtccggccccgggcagcggacaccctgaaggtcccggtgctcacttggacatgaactctcttgatagagcccaagcagccaagaataaaggcaataaatattttaaagcaggaaaatatgaacaagctattcagtgctatactgaggctattagcttgtgccctacagagaagaatgttgacctttctacattttatcaaaacagagctgctgcctttgaacagttgcaaaaatggaaagaagtggcacaagactgtacaaaagctgttgaacttaatcccaaatatgtgaaagctctctttagacgtgcaaaagcccatgagaagctagacaataagaaggaatgtttagaagatgtcactgctgtgtgtatattagaagggttccaaaatcaacaaagcatgctgttagccgataaagttcttaaactccttggaaaagagaaagccaaagaaaaatataagaatcgtgaacctctgatgccatctccacagtttatcaaatcttacttcagttctttcacggatgatatcatttcccagcccatgcttaaaggagagaaatctgatgaagataaagacaaggaaggggaggctttagaagtgaaagaaaattctggatacttaaaggccaaacagtatatggaagaagaaaactacgataaaatcataagtgaatgctcaaaagaaatagatgctgaaggcaaatacatggcagaagcattgctactacgagctaccttctacctgcttattggcaatgccaatgcagccaaaccagatttagataaagtcatcagtttgaaagaagctaatgtgaagcttcgagcaaatgctctcatcaaaagaggcagcatgtacatgcaacagcagcagcctttgctgtccactcaagattttaacatggctgctgacatcgatcctcagaatgcagatgtttatcaccaccgaggacagctgaaaatactccttgatcaagttgaagaagcagtggcagattttgatgaatgtattaggttaagacctgagtctgctctggcacaagcacagaaatgttttgcattgtaccgccaggcatatacgggaaacaactcttcacaaatccaagcagctatgaaaggttttgaagaggtcataaagaaatttccaaggtgtgccgaaggctatgcactatacgcccaggcattaacagatcaacaacagtttggtaaagctgatgaaatgtatgataaatgtattgatttggaaccagataatgctacaacatatgttcataaaggtttacttcaacttcagtggaagcaagatctggatagaggtttggaacttatcagcaaggctattgaaattgacaataaatgtgattttgcctatgaaaccatgggaactattgaagtacaaagaggaaacatggagaaagccattgacatgttcaacaaagctattaacctggccaaatcggaaatggagatggcccatctgtattcactttgcgatgccgcccatgcccagacagaagttgcaaagaaatacggattaaaaccaccaacattataaaacagggggaaagcagactgaccctctttttaaaagtttaccccctcttcaactgaaccctaaagacactgtcatgaactgtgttgaatggtggaaatcagtatttctgtttgtggtgttgttatttgttacatctgtttcatgtctaggtgttgtgggtgtggctgttgaaggaagtttgcagtcttgcagcttttattccctgtgcaacaaaagattagaacatgttaaagggatttttaaataaagttgcaaagagtacaaatgataaaaaaaaaaaaaaaaaaaaaaaaa

SEQ ID NO: 2154 - DNA, 4502 bp, Homo sapiens; identical to SEQ ID NO: 2152

SEQ ID NO: 2155 - DNA, 2475 bp, Homo sapiens
ccggaggagtccgagaggaagcggaggcgcgagctggaggcggcggctcccgtcggcctccggcaggactgagcgctgggaggccggaaggcgggcgcgcacggcggagaggcgggcgggaggccggagcatattaatgaaaagtgccataaactgaaaaaccaaacatgagggtagcaggtgctgcaaagttggtggtagctgtggcagtgtttttactgacattttatgttatttctcaagtatttgaaataaaaatggatgcaagtttaggaaatctatttgcaagatcagcattggacacagctgcacgttctacaaagcctcccagatataagtgtgggatctcaaaagcttgccctgagaagcattttgcttttaaaatggcaagtggagcagccaacgtggtgggacccaaaatctgcctggaagataatgttttaatgagtggtgttaagaataatgttggaagagggatcaatgttgccttggcaaatggaaaaacaggagaagtattagacactaaatattttgacatgtggggaggagatgtggcaccatttattgagtttctgaaggccatacaagatggaacaatagttttaatgggaacatacgatgatggagcaaccaaactcaatgatgaggcacggcggctcattgctgatttggggagcacatctattactaatcttggttttagagacaactgggtcttctgtggtgggaagggcattaagacaaaaagcccttttgaacagcacataaagaacaataaggatacaaacaaatatgaaggatggcctgaagttgtagaaatggaaggatgcatcccccagaagcaagactaatggaaatgtggagagaattgaagaaagcgcactttcactcttaatgggagagctataaatggcagagctatgtgtaaatattttaagagcatgcagccatcttggtgtgtgcatgagtattgtctcttttgatatcaggattatttattgctaacgtaaatagatagcattgtaaataatcatcacaatgatcaaatcactgaaccatgtctccgcacatttccctaaaagtacaatgtttagactgctatggtaatacatattttaaattctaaaagcatacacaatgtgtaactgaatggtttgtgaaaaatatattgatatatatactagttgctatgaaaatatcatggaataatagggattttagggtggatactttattttcttttatgtttctatatgttgcgttgtgatgacattatcttttaaattaaaaagagatttggctagttgtgtgtgtaatgttactttacagtccgactctcctgatgtacctcttttcatgatctttttctttccttcccaagaaactgaggaatgtttaatatgaaaacatacatcggatatgtgaaaagcacaacaaaattcttaatgtacacagtaaaaaagtaaatatataaatgtagatggcatttaggaccacagcttgctggatttgtgttagctatgggaataacttgattttgtataagctatttagagtgaggctggaggtggcagcttcacagaactggagaaccaggccaagtcccctccccaacctaattaggtcattcaggacagctaagtcagtatatttagagcaatactagcatacgtttttcttaattgttatcagcattgaccaagtggtttggaaggaggcatgctttaatatcacaataattttgatttgtaaaccaagaaattaatcctgtgtttatctaacttcataatagcaattattgcccgaagctatagtggcatatttacaaaagttcttattactgggcggactgataacatttaaaaaataattgtgtttgaccccaaatgactttatacccaattctacataaaaatatagaagatctatctttttttgttaccttcagatgttcactaaataactcagtttttaagcagaagttttcagggcattaaatatatgttgtgtatgaagtatctcaaactggaacataaatttagtgatcaaactgccattcacagtgtaaggcagcacttaaatttcgaacctaaagtttagatgcattgtataaaaaaacctaaaagcagtatctgttatttagctgtaaaccaagttggaagctattcggataatttcttaaatattgatgaactttggagtactgtttcttccttcaaactgaatgtaattaattcatgaataaatgcaccttatatgtttaaacaatctttgtatacttttgggatttttggtgcttatatgctaaatcacattcagcatgtgtattttgacatttaaaatacttccctcaattctgtaaattaaaagaatagttattttacagttccagggattgtgaaataaatgttgcagttttttaaaataatgaaaataaatactcttggttttgctttgtgaaaaaaaaaaaaaaaa

SEQ ID NO: 2156 - DNA, 5623 bp, Homo sapiens
gaaactccggcgcaggagtcccgggctgccgctggcaacatcgtgtcacccagctaagaaaatccgcgggcccgagccacgcgcctgtgaatcggagaggtcccactgcccgagtggagccgggctgagattcttctcaagttgagcctcagtgatcctgtggccgaagttagcgccttgacgtgggacaaccggacacgtcgccaggacagaactgaggcgccttctagcagttgtgacgccaaaatcacgtctccggagacccgcgccctccgccagccgggcgcaccctcgccggtagccttctttgtgcgccgtccggactcccagctcccggcccggcagccgagccccagcacaaagcagtcggaccgcgccgcccgcctcccctctcgcgtctccgcctcggtttcccaactctgcgccgtcgggccgcggcaggatgattgcctcgcatctgcttgcctacttcttcacggagctcaaccatgaccaagtgcagaaggttgaccagtatctctaccacatgcgcctctctgatgagaccctcttggagatctctaagcggttccgcaaggagatggagaaagggcttggagccaccactcaccctactgcagcagtgaagatgctgcccacctttgtgaggtccactccagatgggacagaacacggagagttcctggctctggatcttggagggaccaacttccgtgtgctttgggtgaaagtaacggacaatgggctccagaaggtggagatggagaatcagatctatgccatccctgaggacatcatgcgaggcagtggcacccagctgtttgaccacattgccgaatgcctggctaacttcatggataagctacaaatcaaagacaagaagctcccactgggttttaccttctcgttcccctgccaccagactaaactagacgagagtttcctggtctcatggaccaagggattcaagtccagtggagtggaaggcagagacgttgtggctctgatccggaaggccatccagaggagaggggactttgatatcgacattgtggctgtggtgaatgacacagttgggaccatgatgacctgtggttatgatgaccacaactgtgagattggtctcattgtgggcacgggcagcaacgcctgctacatggaagagatgcgccacatcgacatggtggaaggcgatgaggggcggatgtgtatcaatatggagtggggggccttcggggacgatggctcgctcaacgacattcgcactgagtttgaccaggagattgacatgggctcactgaacccgggaaagcaactgtttgagaagatgatcagtgggatgtacatgggggagctggtgaggcttatcctggtgaagatggccaaggaggagctgctctttggggggaagctcagcccagagcttctcaacaccggtcgctttgagaccaaagacatctcagacattgaaggggagaaggatggcatccggaaggcccgtgaggtcctgatgcggttgggcctggacccgactcaggaggactgcgtggccactcaccggatctgccagatcgtgtccacacgctccgccagcctgtgcgcagccaccctggccgccgtgctgcagcgcatcaaggagaacaaaggcgaggagcggctgcgctctactattggggtcgacggttccgtctacaagaaacacccccattttgccaagcgtctacataagaccgtgcggcggctggtgcccggctgcgatgtccgcttcctccgctccgaggatggcagtggcaaaggtgcagccatggtgacagcagtggcttaccggctggccgatcaacaccgtgcccgccagaagacattagagcatctgcagctgagccatgaccagctgctggaggtcaagaggaggatgaaggtagaaatggagcgaggtctgagcaaggagactcatgccagtgcccccgtcaagatgctgcccacctacgtgtgtgctaccccggacggcacagagaaaggggacttcttggccttggaccttggaggaacaaatttccgggtcctgctggtccgtgttcggaatgggaagtggggtggagtggagatgcacaacaagatctacgccatcccgcaggaggtcatgcacggcaccggggacgagctctttgaccacattgtccagtgcatcgcggacttcctcgagtacatgggcatgaagggcgtgtccctgcctctgggttttaccttctccttcccctgccagcagaacagcctggacgagagcatcctcctcaagtggacaaaaggcttcaaggcatctggctgcgagggcgaggacgtggtgaccctgctgaaggaagcgatccaccggcgagaggagtttgacctggatgtggttgctgtggtgaacgacacagtcggaactatgatgacctgtggctttgaagaccctcactgtgaagttggcctcattgttggcacgggcagcaatgcctgctacatggaggagatgcgcaacgtggaactggtggaaggagaagaggggcggatgtgtgtgaacatggaatggggggccttcggggacaatggatgcctagatgacttccgcacagaatttgatgtggctgtggatgagctttcactcaaccccggcaagcagaggttcgagaaaatgatcagtggaatgtacctgggtgagattgtccgtaacattctcatcgatttcaccaagcgtggactactcttccgaggccgcatctcagagcggctcaagacaaggggcatctttgaaaccaagttcttgtctcagattgagagtgactgcctggccctgctgcaagtccgagccatcctgcaacacttagggcttgagagcacctgtgacgacagcatcattgttaaggaggtgtgcactgtggtggcccggcgggcagcccagctctgtggcgcaggcatggccgctgtggtggacaggatacgagaaaaccgtgggctggacgctctcaaagtgacagtgggtgtggatgggaccctctacaagctacatcctcactttgccaaagtcatgcatgagacagtgaaggacctggctccgaaatgtgatgtgtctttcctgcagtcagaggatggcagcgggaagggggcggcgctcatcactgctgtggcctgccgcatccgtgaggctggacagcgatagaacccctgaaatcggaagggacttcctctttctctccttcttccctgttttaaattataagatgtcatccccttgtgtcagagacagaccccttggcttttgcttggcagagaggaccccactggactgggttttgtctctgcatctcattgtagagcttggtggctgagcttggccctattaagataaatagagttccaaataaggatttgttcacatgcatcataaccattcccattggttctcctaaaacatgaaaattatctcccttagtaatcccccttgccaaattccatgtccctgtataattctacaggatggggacactaatgaagatacggttgcttcaccttggagcctgaacatgacatttctaagtggggtgcatcccccagcactgatgttgttactgattctcctgtcagagatctgggaggtctccactgaggatgtgagcctgattatcctataggcagacgtggggagggtggaggggtgacagtggaggaaaatccatggatatccacgcagcagcccctctttaacctcatctacaagcatttgccctgtggattccagcatttgccattcctggaatcaaggaatcctgagtctgggcaatgaaaccaaagccaggagttgacgcatcctgcagttgggccagctgtcgcatctcagcggggcgcacatgttatccacaagcaatggacctttggggaagggggagtttttagtttgttttacaaatttttcctgcaaaagtggaatcactgtattttcattttaatttatatttgaaattttatttagttcttgagcatctgcttcttcatcttgacatgtaatgaatggtcagttgtacgtaatgtatttatatgttaatttgttatgtatatagatgtgcaagtcttgtcagaattggcctcagtgtagttaaagggcagaaggggaagatactgactagtcatagaaatacctcattcgcctgtgggaagagaagggaagcctcttcagggtgagtgaatggcaaagcggttgcttctggctcctccttcccctgtggtcttggaagtgtgtggaaggcagggacagagatggaggccgagccaatagactgaagagaccacagcaattggctcctccatctagagattttcttggcagtattccatgggatgttaagcaaaggaaaccaaaggaatcgtttcaaatggactcatggcttagaaatctttattcttagggcagtcagtagtattctaaagctttctgacaagataaaggaagtcaccaaaatttctttttttaaattgtatctaatcctcaacaacaaaccaaaacagaacaattaaacagccaaataaaacctcagggacaacatttttggtgtatttgagccctcccagcaagtttcaccttgggtttgtattttaaatgttttacaagaattgtccatgtgcttccctaggctgagctggcattggtctgctgacctgtttttgtgtttttcttttttttatacacaacatttatttcaaactattgggagggatgagagtggcttaaaaacttccatccctacttttcaagagtgcagttgattctgaatctgaaagcccgcctctgtcctaaaatacaaacaagcacagacattaaacctggatactatatgataaagagggatgtaactattgaattggatacaaggatcagaatggaaagaaactcacgatgaaattgaacctggtttttgtatatttatcaaacttgtgctgagaatagtgtctgattatacgacttttaagcaaagttgggtgtaattaggtgaaaacagcccaggtcctcccgggagcacagaggggctaggggctggtccttctcgtttgctctagtcttgctttgctgtctggtgtagctcctctgctgctcccatctgcactaattgacccaaaacgtgggtatttcctgctacacaaaagccaaaaggtttcatgtagattttagttcactaaagggtgcccacaaaatagagattaattttaacttaaattttaagcttgaagattaggtactatctgtgaagttacacttttttttttttttttaaaggtagagatgtgtgtgtgtgtaggtattaaagatgtgttgttggtttccaaaaaggaacactggaaaataaattttgaatgtttatgttctcagaatcaggttgacagtcccttgctgacatggctttgctttgtgtaaatacagtggatctcaatcttcggggtgtgatgaatagcgaatcatctcaaatccttgagcactcagtctagtgaagatgttgtcattatgtacaatacataactagtttaattaactatgtgatgttaactattattaataaattttaacattttccaaaataaaaaaaaaaaaaaaaaa

SEQ ID NO: 2157 - DNA, 2809 bp, Homo sapiens; identical to SEQ ID NO: 2132

SEQ ID NO: 2158 - DNA, 4240 bp, Homo sapiens
ctttggagacggctatccgcgcgggagtgcgccacgcggggccggagcgcctattagccgccaggacctcggagcgccccgaccacccctgagcccctctggcttcggagccccccagcaccccttcccgggtcccctcgcccaccctaatccactctccctccctttcccggattccctcgctcaccccatcctctctcccgccccttcctggattccctcacccgtctcgatcccctctccgccctttcccagagacccagagcccctgaccccccgcgccctccccggagccccccgcgcgtgccgcggccatggcggccgtgcgcggggcgcccctgctcagctgcctcctggcgttgctggccctgtgccctggagggcgcccgcagacggtgctgaccgacgacgagatcgaggagttcctcgagggcttcctgtcagagctagaacctgagccccgggaggacgacgtggaggccccgccgcctcccgagcccaccccgcgggtccgaaaagcccaggcggggggcaagccagggaagcggccagggacggccgcagaagtgcctccggaaaagaccaaagacaaagggaagaaaggcaagaaagacaaaggccccaaggtgcccaaggagtccttggaggggtcccccaggccgcccaagaaggggaaggagaagccacccaaggccaccaagaagcccaaggagaagccacctaaggccaccaagaagcccaaggagaagccacccaaggccaccaagaagcccaaagagaagccacccaaggccaccaagaagcccccgtcagggaagaggccccccattctggctccctcagaaaccctggagtggccactgcccccaccccccagccctggccccgaggagctaccccaggagggaggggcgcccctctcaaataactggcagaatccaggagaggagacccatgtggaggcacgggagcaccagcctgagccggaggaggagaccgagcaacccacactggactacaatgaccagatcgagagggaggactatgaggactttgagtacattcggcgccagaagcaacccaggccacccccaagcagaaggaggaggcccgagcgggtctggccagagccccctgaggagaaggccccggccccagccccggaggagaggattgagcctcctgtgaagcctctgctgcccccgctgccccctgactatggtgatggttacgtgatccccaactacgatgacatggactattactttgggcctcctccgccccagaagcccgatgctgagcgccagacggacgaagagaaggaggagctgaagaaacccaaaaaggaggacagcagccccaaggaggagaccgacaagtgggcagtggagaagggcaaggaccacaaagagccccgaaagggcgaggagttggaggaggagtggacgcctacggagaaagtcaagtgtccccccattgggatggagtcacaccgtattgaggacaaccagatccgagcctcctccatgctgcgccacggcctgggggcacagcgcggccggctcaacatgcagaccggtgccactgaggacgactactatgatggtgcgtggtgtgccgaggacgatgccaggacccagtggatagaggtggacaccaggaggactacccggttcacaggcgtcatcacccagggcagagactccagcatccatgacgattttgtgaccaccttcttcgtgggcttcagcaatgacagccagacatgggtgatgtacaccaacggctatgaggaaatgacctttcatgggaacgtggacaaggacacacccgtgctgagtgagctcccagagccggtggtggctcgtttcatccgcatctacccactcacctggaatggcagcctgtgcatgcgcctggaggtgctggggtgctctgtggcccctgtctacagctactacgcacagaatgaggtggtggccaccgatgacctggatttccggcaccacagctacaaggacatgcgccagctcatgaaggtggtgaacgaggagtgccccaccatcacccgcacttacagcctgggcaagagctcacgaggcctcaagatctatgccatggagatctcagacaaccctggggagcatgaactgggggagcccgagttccgctacactgctgggatccatggcaacgaggtgctgggccgagagctgttgctgctgctcatgcagtacctgtgccgagagtaccgcgatgggaacccacgtgtgcgcagcctggtgcaggacacacgcatccacctggtgccctcactgaaccctgatggctacgaggtggcagcgcagatgggctcagagtttgggaactgggcgctgggactgtggactgaggagggctttgacatctttgaagatttcccggatctcaactctgtgctctggggagctgaggagaggaaatgggtcccctaccgggtccccaacaataacttgcccatccctgaacgctacctttcgccagatgccacggtatccacggaggtccgggccatcattgcctggatggagaagaaccccttcgtgctgggagcaaatctgaacggcggcgagcggctagtatcctacccctacgatatggcccgcacgcctacccaggagcagctgctggccgcagccatggcagcagcccggggggaggatgaggacgaggtctccgaggcccaggagactccagaccacgccatcttccggtggcttgccatctccttcgcctccgcacacctcaccttgaccgagccctaccgcggaggctgccaagcccaggactacaccggcggcatgggcatcgtcaacggggccaagtggaacccccggaccgggactatcaatgacttcagttacctgcataccaactgcctggagctctccttctacctgggctgtgacaagttccctcatgagagtgagctgccccgcgagtgggagaacaacaaggaggcgctgctcaccttcatggagcaggtgcaccgcggcattaagggggtggtgacggacgagcaaggcatccccattgccaacgccaccatctctgtgagtggcattaatcacggcgtgaagacagccagtggtggtgattactggcgaatcttgaacccgggtgagtaccgcgtgacagcccacgcggagggctacaccccgagcgccaagacctgcaatgttgactatgacatcggggccactcagtgcaacttcatcctggctcgctccaactggaagcgcatccgggagatcatggccatgaacgggaaccggcctatcccacacatagacccatcgcgccctatgaccccccaacagcgacgcctgcagcagcgacgcctacaacaccgcctgcggcttcgggcacagatgcggctgcggcgcctcaacgccaccaccaccctaggcccccacactgtgcctcccacgctgccccctgcccctgccaccaccctgagcactaccatagagccctggggcctcataccgccaaccaccgctggctgggaggagtcggagactgagacctacacagaggtggtgacagagtttgggaccgaggtggagcccgagtttgggaccaaggtggagcccgagtttgagacccagttggagcctgagtttgagacccagctggaacccgagtttgaggaagaggaggaggaggagaaagaggaggagatagccactggccaggcattccccttcacaacagtagagacctacacagtgaactttggggacttctgagatcagcgtcctaccaagaccccagcccaactcaagctacagcagcagcacttcccaagcctgctgaccacagtcacatcacccatcagcacatggaaggcccctggtatggacactgaaaggaagggctggtcctgcccctttgagggggtgcaaacatgactgggacctaagagccagaggctgtgtagaggctcctgctccacctgccagtctcgtaagagatggggttgctgcagtgttggagtaggggcagagggagggagccaaggtcactccaataaaacaagctcatggcacggactgctcacattctgaggtgtcagggatggggaggagggagaccggctggtgggtgcatgggctatggtcactgtgggcacccctgcaggagtcccatagccagagtgcccagggctcaaggctcgcatcagcaagtgctcaggctt

SEQ ID NO: 2159 - DNA, 4125 bp, Homo sapiens
cggctatccgcgcgggagtgcgccacgcggggccggagcgcctattagccgccaggacctcggagcgccccgaccacccctgagcccctctggcttcggagccccccagcaccccttcccgggtcccctcgcccaccctaatccactctccctccctttcccggattccctcgctcaccccatcctctctcccgccccttcctggattccctcacccgtctcgatcccctctccgccctttcccagagacccagagcccctgaccccccgcgccctccccggagccccccgcgcgtgccgcggccatggcggccgtgcgcggggcgcccctgctcagctgcctcctggcgttgctggccctgtgccctggagggcgcccgcagacggtgctgaccgacgacgagatcgaggagttcctcgagggcttcctgtcagagctagaacctgagccccgggaggacgacgtggaggccccgccgcctcccgagcccaccccgcgggtccgaaaagcccaggcggggggcaagccagggaagcggccagggacggccgcagaagtgcctccggaaaagaccaaagacaaagggaagaaaggcaagaaagacaaaggccccaaggtgcccaaggagtccttggaggggtcccccaggccgcccaagaaggggaaggagaagccacccaaggccaccaagaagcccaaggagaagccacctaaggccaccaagaagcccaaggagaagccacccaaggccaccaagaagcccaaagagaagccacccaaggccaccaagaagcccccgtcagggaagaggccccccattctggctccctcagaaaccctggagtggccactgcccccaccccccagccctggccccgaggagctaccccaggagggaggggcgcccctctcaaataactggcagaatccaggagaggagacccatgtggaggcacgggagcaccagcctgagccggaggaggagaccgagcaacccacactggactacaatgaccagatcgagagggaggactatgaggactttgagtacattcggcgccagaagcaacccaggccacccccaagcagaaggaggaggcccgagcgggtctggccagagccccctgaggagaaggccccggccccagccccggaggagaggattgagcctcctgtgaagcctctgctgcccccgctgccccctgactatggtgatggttacgtgatccccaactacgatgacatggactattactttgggcctcctccgccccagaagcccgatgctgagcgccagacggacgaagagaaggaggagctgaagaaacccaaaaaggaggacagcagccccaaggaggagaccgacaagtgggcagtggagaagggcaaggaccacaaagagccccgaaagggcgaggagttggaggaggagtggacgcctacggagaaagtcaagtgtccccccattgggatggagtcacaccgtattgaggacaaccagatccgagcctcctccatgctgcgccacggcctgggggcacagcgcggccggctcaacatgcagaccggtgccactgaggacgactactatgatggtgcgtggtgtgccgaggacgatgccaggacccagtggatagaggtggacaccaggaggactacccggttcacaggcgtcatcacccagggcagagactccagcatccatgacgattttgtgaccaccttcttcgtgggcttcagcaatgacagccagacatgggtgatgtacaccaacggctatgaggaaatgacctttcatgggaacgtggacaaggacacacccgtgctgagtgagctcccagagccggtggtggctcgtttcatccgcatctacccactcacctggaatggcagcctgtgcatgcgcctggaggtgctggggtgctctgtggcccctgtctacagctactacgcacagaatgaggtggtggccaccgatgacctggatttccggcaccacagctacaaggacatgcgccagctcatgaaggtggtgaacgaggagtgccccaccatcacccgcacttacagcctgggcaagagctcacgaggcctcaagatctatgccatggagatctcagacaaccctggggagcatgaactgggggagcccgagttccgctacactgctgggatccatggcaacgaggtgctgggccgagagctgttgctgctgctcatgcagtacctgtgccgagagtaccgcgatgggaacccacgtgtgcgcagcctggtgcaggacacacgcatccacctggtgccctcactgaaccctgatggctacgaggtggcagcgcagatgggctcagagtttgggaactgggcgctgggactgtggactgaggagggctttgacatctttgaagatttcccggatctcaactctgtgctctggggagctgaggagaggaaatgggtcccctaccgggtccccaacaataacttgcccatccctgaacgctacctttcgccagatgccacggtatccacggaggtccgggccatcattgcctggatggagaagaaccccttcgtgctgggagcaaatctgaacggcggcgagcggctagtatcctacccctacgatatggcccgcacgcctacccaggagcagctgctggccgcagccatggcagcagcccggggggaggatgaggacgaggtctccgaggcccaggagactccagaccacgccatcttccggtggcttgccatctccttcgcctccgcacacctcaccttgaccgagccctaccgcggaggctgccaagcccaggactacaccggcggcatgggcatcgtcaacggggccaagtggaacccccggaccgggactatcaatgacttcagttacctgcataccaactgcctggagctctccttctacctgggctgtgacaagttccctcatgagagtgagctgccccgcgagtgggagaacaacaaggaggcgctgctcaccttcatggagcaggtgcaccgcggcattaagggggtggtgacggacgagcaaggcatccccattgccaacgccaccatctctgtgagtggcattaatcacggcgtgaagacagccagtggtggtgattactggcgaatcttgaacccgggtgagtaccgcgtgacagcccacgcggagggctacaccccgagcgccaagacctgcaatgttgactatgacatcggggccactcagtgcaacttcatcctggctcgctccaactggaagcgcatccgggagatcatggccatgaacgggaaccggcctatcccacacatagacccatcgcgccctatgaccccccaacagcgacgcctgcagcagcgacgcctacaacaccgcctgcggcttcgggcacagatgcggctgcggcgcctcaacgccaccaccaccctaggcccccacactgtgcctcccacgctgccccctgcccctgccaccaccctgagcactaccatagagccctggggcctcataccgccaaccaccgctggctgggaggagtcggagactgagacctacacagaggtggtgacagagtttgggaccgaggtggagcccgagtttgggaccaaggtggagcccgagtttgagacccagttggagcctgagtttgagacccagctggaacccgagtttgaggaagaggaggaggaggagaaagaggaggagatagccactggccaggcattccccttcacaacagtagagacctacacagtgaactttggggacttctgagatcagcgtcctaccaagaccccagcccaactcaagctacagcagcagcacttcccaagcctgctgaccacagtcacatcacccatcagcacatggaaggcccctggtatggacactgaaaggaagggctggtcctgcccctttgagggggtgcaaacatgactgggacctaagagccagaggctgtgtagaggctcctgctccacctgccagtctcgtaagagatggggttgctgcagtgttggagtaggggcagagggagggagccaaggtcactccaataaaacaagctcatggcaaaaaaaaaaaaaaaaaaaaaaaaaaaaaaaaaaaaaaaaaaaaa

SEQ ID NO: 2160 - DNA, 2235 bp, Homo sapiens
gggagtacgacatggcgcgcgagctgcgggcgctgctgctgtggggccgccgcctgcggcctttgctgcgggcgccggcgctggcggccgtgccgggaggaaaaccaattctgtgtcctcggaggaccacagcccagttgggccccaggcgaaacccagcctggagcttgcaggcaggacgactgttcagcacgcagaccgccgaggacaaggaggaacccctgcactcgattatcagcagcacagagagcgtgcagggttccacttccaaacatgagttccaggccgagacaaagaagcttttggacattgttgcccggtccctgtactcagaaaaagaggtgtttatacgggagctgatctccaatgccagcgatgccttggaaaaactgcgtcacaaactggtgtctgacggccaagcactgccagaaatggagattcacttgcagaccaatgccgagaaaggcaccatcaccatccaggatactggtatcgggatgacacaggaagagctggtgtccaacctggggacgattgccagatcggggtcaaaggccttcctggatgctctgcagaaccaggctgaggccagcagcaagatcatcggccagtttggagtgggtttctactcagctttcatggtggctgacagagtggaggtctattcccgctcggcagccccggggagcctgggttaccagtggctttcagatggttctggagtgtttgaaatcgccgaagcttcgggagttagaaccgggacaaaaatcatcatccacctgaaatccgactgcaaggagttttccagcgaggcccgggtgcgagatgtggtaacgaagtacagcaacttcgtcagcttccccttgtacttgaatggaaggcggatgaacaccttgcaggccatctggatgatggaccccaaggatgtcggtgagtggcaacatgaggagttctaccgctacgtcgcgcaggctcacgacaagccccgctacaccctgcactataagacggacgcaccgctcaacatccgcagcatcttctacgtgcccgacatgaaaccgtccatgtttgatgtgagccgggagctgggctccagcgttgcactgtacagccgcaaagtcctcatccagaccaaggccacggacatcctgcccaagtggctgcgcttcatccgaggtgtggtggacagtgaggacattcccctgaacctcagccgggagctgctgcaggagagcgcactcatcaggaaactccgggacgttttacagcagaggctgatcaaattcttcattgaccagagtaaaaaagatgctgagaagtatgcaaagttttttgaagattacggcctgttcatgcgggagggcattgtgaccgccaccgagcaggaggtcaaggaggacatagcaaagctgctgcgctacgagtcctcggcgctgccctccgggcagctaaccagcctctcagaatacgccagccgcatgcgggccggcacccgcaacatctactacctgtgcgcccccaaccgtcacctggcagagcactcaccctactatgaggccatgaagaagaaagacacagaggttctcttctgctttgagcagtttgatgagctcaccctgctgcaccttcgtgagtttgacaagaagaagctgatctctgtggagacggacatagtcgtggatcactacaaggaggagaagtttgaggacaggtccccagccgccgagtgcctatcagagaaggagacggaggagctcatggcctggatgagaaatgtgctggggtcgcgtgtcaccaacgtgaaggtgaccctccgactggacacccaccctgccatggtcaccgtgctggagatgggggctgcccgccacttcctgcgcatgcagcagctggccaagacccaggaggagcgcgcacagctcctgcagcccacgctggagatcaaccccaggcacgcgctcatcaagaagctgaatcagctgcgcgcaagcgagcctggcctggctcagctgctggtggatcagatatacgagaacgccatgattgctgctggacttgttgacgaccctagggccatggtgggccgcttgaatgagctgcttgtcaaggccctggagcgacactgacagccagggggccagaaggactgacaccacagatgacagccccacctccttgagctttatttacctaaatttaaaggtatttcttaacccgaaaaaaaaaaaaaaaaaa

SEQ ID NO: 2161 - DNA, 3786 bp, Homo sapiens
gtcccgccccttcccatcgtgtacggtcccgcgtggctgcgcgcggcgctctgggagtacgacatggcgcgcgagctgcgggcgctgctgctgtggggccgccgcctgcggcctttgctgcgggcgccggcgctggcggccgtgccgggaggaaaaccaattctgtgtcctcggaggaccacagcccagttgggccccaggcgaaacccagcctggagcttgcaggcaggacgactgttcagcacgcagaccgccgaggacaaggaggaacccctgcactcgattatcagcagcacagagagcgtgcagggttccacttccaaacatgagttccaggccgagacaaagaagcttttggacattgttgcccggtccctgtactcagaaaaagaggtgtttatacgggagctgatctccaatgccagcgatgccttggaaaaactgcgtcacaaactggtgtctgacggccaagcactgccagaaatggagattcacttgcagaccaatgccgagaaaggcaccatcaccatccaggatactggtatcgggatgacacaggaagagctggtgtccaacctggggacgattgccagatcggggtcaaaggccttcctggatgctctgcagaaccaggctgaggccagcagcaagatcatcggccagtttggagtgggtttctactcagctttcatggtggctgacagagtggaggtctattcccgctcggcagccccggggagcctgggttaccagtggctttcagatggttctggagtgtttgaaatcgccgaagcttcgggagttagaaccgggacaaaaatcatcatccacctgaaatccgactgcaaggagttttccagcgaggcccgggtgcgagatgtggtaacgaagtacagcaacttcgtcagcttccccttgtacttgaatggaaggcggatgaacaccttgcaggccatctggatgatggaccccaaggatgtccgtgagtggcaacatgaggagttctaccgctacgtcgcgcaggctcacgacaagccccgctacaccctgcactataagacggacgcaccgctcaacatccgcagcatcttctacgtgcccgacatgaaaccgtccatgtttgatgtgagccgggagctgggctccagcgttgcactgtacagccgcaaagtcctcatccagaccaaggccacggacatcctgcccaagtggctgcgcttcatccgaggtgtggtggacagtgaggacattcccctgaacctcagccgggagctgctgcaggagagcgcactcatcaggaaactccgggacgttttacagcagaggctgatcaaattcttcattgaccagagtaaaaaagatgctgagaagtatgcaaagttttttgaagattacggcctgttcatgcgggagggcattgtgaccgccaccgagcaggaggtcaaggaggacatagcaaagctgctgcgctacgagtcctcggcgctgccctccgggcagctaaccagcctctcagaatacgccagccgcatgcgggccggcacccgcaacatctactacctgtgcgcccccaaccgtcacctggcagagcactcaccctactatgaggccatgaagaagaaagacacagaggttctcttctgctttgagcagtttgatgagctcaccctgctgcaccttcgtgagtttgacaagaagaagctgatctctgtggagacggacatagtcgtggatcactacaaggaggagaagtttgaggacaggtccccagccgccgagtgcctatcagagaaggagacggaggagctcatggcctggatgagaaatgtgctggggtcgcgtgtcaccaacgtgaaggtgaccctccgactggacacccaccctgccatggtcaccgtgctggagatgggggctgcccgccacttcctgcgcatgcagcagctggccaagacccaggaggagcgcgcacagctcctgcagcccacgctggagatcaaccccaggcacgcgctcatcaagaagctgaatcagctgcgcgcaagcgagcctggcctggctcagctgctggtggatcagatatacgagaacgccatgattgctgctggacttgttgacgaccctagggccatggtgggccgcttgaatgagctgcttgtcaaggccctggagcgacactgacagccagggggccagaaggactgacaccacagatgacagccccacctccttgagctttatttacctaaatttaaaggaactcccaggcatagtgcccctgcttcctctacctgccagaaggaaggctggaacttgggcctcgcttgtacaaatggcgagtgctgcctgctgtgtggctgccctcaggacgggctttggtgagggcagcacagccctggaggagcctggtctgacatggggcccgtctgggatcactgttgggccttcaaccgtctggagcctctatgtcttcctctgatagattcccagaacaatcatttcaccttctaagaagccatcctgcccctgcagcctgtggcttgtggagtctccagcactctcacttctccctcgtggatctcttttctgtctgtgtcagtcaatgctgccatgtaacagccacctgcaaactcagtgtatacacatgcatttctctcacactgccaggtctgctggggtggctctgctgcctgggcctcgtcctggggctgggctggagagactgcagctccctgggcaccctcttcccacagtgtggaaggtggaggctcccagggcacaagcagaacacgtgccgccctaaggccaaggcggagctggctgctgtcgcttctgcccacattccatgggtgctgtcgagctgtaggtccaagccccacatcaggggagtgagtggggtacaatcctcccatgctgggccccactctggagataggcctggggaatgcccaagaaggaagcccagcccttctgggattttcacatccacagagaatgggtgctggcagccaacggcaacgaggagaaaagctgaccgccttctcagatcaggatgaggtgtttttacaccaaccccgaggatctgcagccttctcaggttaaattaaacctgtcacagacacaggaagggaaaagagcacataacaacaattatattgacatctaagccaggtcacatgctctgatttggctgaaattacaggataaaggaaaaatcctataggcaccatggctggaaacaaatggcctcaaaggaacgctggtggccgtggctttgtgcaacgacagccagtgttgtgtgacccagcgacgtgcaggccagggagggtacccttctactgatcaagagggaaagcgggaaggacgcacagctgtggtttccaacctgcacggaggcacccccatgaactcacagagcaccatcagatccttctgaattttgaaggaagcaatgatactctgctctgctcaaggccattcatggtctcaacattaacgttaccttgctttatagggtatcttccctctctctgccaggctgggttgtggcagtcactgaacaagcaattactgtgaaggtcgacgtggaaaaatgaggcaatgagggtggcggtgttctaccagattccaagttgaagaggtgctcgacaggcacacacatcccatgactaaacaaataacatgaacatttctctttatgtattacttttctagacatccactataagttgccaggacacaaatgcttattattggggtttacttatttaataaatggaactgtggggg

SEQ ID NO: 2162 - DNA, 3786 bp, Homo sapiens; identical to SEQ ID NO: 2161

SEQ ID NO: 2163 - DNA, 3786 bp, Homo sapiens; identical to SEQ ID NO: 2161

SEQ ID NO: 2164 - DNA, 3786 bp, Homo sapiens; identical to SEQ ID NO: 2161

SEQ ID NO: 2165 - DNA, 3786 bp, Homo sapiens; identical to SEQ ID NO: 2161

SEQ ID NO: 2166 - DNA, 2589 bp, Homo sapiens
cgcccgcagagccgccccaggtgcctgggtgttgtgtgattgacgcggggaaggaggggtcagccgatccctccccaaccctccatcccatccctgaggattgggctggtacccgcgtctctcggacagatgcctgaggaagtgcaccatggagaggaggaggtggagacttttgcctttcaggcagaaattgcccaactcatgtccctcatcatcaataccttctattccaacaaggagattttccttcgggagttgatctctaatgcttctgatgccttggacaagattcgctatgagagcctgacagacccttcgaagttggacagtggtaaagagctgaaaattgacatcatccccaaccctcaggaacgtaccctgactttggtagacacaggcattggcatgaccaaagctgatctcataaataatttgggaaccattgccaagtctggtactaaagcattcatggaggctcttcaggctggtgcagacatctccatgattgggcagtttggtgttggcttttattctgcctacttggtggcagagaaagtggttgtgatcacaaagcacaacgatgatgaacagtatgcttgggagtcttctgctggaggttccttcactgtgcgtgctgaccatggtgagcccattggcaggggtaccaaagtgatcctccatcttaaagaagatcagacagagtacctagaagagaggcgggtcaaagaagtagtgaagaagcattctcagttcataggctatcccatcaccctttatttggagaaggaacgagagaaggaaattagtgatgatgaggcagaggaagagaaaggtgagaaagaagaggaagataaagatgatgaagaaaaacccaagatcgaagatgtgggttcagatgaggaggatgacagcggtaaggataagaagaagaaaactaagaagatcaaagagaaatacattgatcaggaagaactaaacaagaccaagcctatttggaccagaaaccctgatgacatcacccaagaggagtatggagaattctacaagagcctcactaatgactgggaagaccacttggcagtcaagcacttttctgtagaaggtcagttggaattcagggcattgctatttattcctcgtcgggctccctttgacctttttgagaacaagaagaaaaagaacaacatcaaactctatgtccgccgtgtgttcatcatggacagctgtgatgagttgataccagagtatctcaattttatccgtggtgtggttgactctgaggatctgcccctgaacatctcccgagaaatgctccagcagagcaaaatcttgaaagtcattcgcaaaaacattgttaagaagtgccttgagctcttctctgagctggcagaagacaaggagaattacaagaaattctatgaggcattctctaaaaatctcaagcttggaatccacgaagactccactaaccgccgccgcctgtctgagctgctgcgctatcatacctcccagtctggagatgagatgacatctctgtcagagtatgtttctcgcatgaaggagacacagaagtccatctattacatcactggtgagagcaaagagcaggtggccaactcagcttttgtggagcgagtgcggaaacggggcttcgaggtggtatatatgaccgagcccattgacgagtactgtgtgcagcagctcaaggaatttgatgggaagagcctggtctcagttaccaaggagggtctggagctgcctgaggatgaggaggagaagaagaagatggaagagagcaaggcaaagtttgagaacctctgcaagctcatgaaagaaatcttagataagaaggttgagaaggtgacaatctccaatagacttgtgtcttcaccttgctgcattgtgaccagcacctacggctggacagccaatatggagcggatcatgaaagcccaggcacttcgggacaactccaccatgggctatatgatggccaaaaagcacctggagatcaaccctgaccaccccattgtggagacgctgcggcagaaggctgaggccgacaagaatgataaggcagttaaggacctggtggtgctgctgtttgaaaccgccctgctatcttctggcttttcccttgaggatccccagacccactccaaccgcatctatcgcatgatcaagctaggtctaggtattgatgaagatgaagtggcagcagaggaacccaatgctgcagttcctgatgagatcccccctctcgagggcgatgaggatgcgtctcgcatggaagaagtcgattaggttaggagttcatagttggaaaacttgtgcccttgtatagtgtccccatgggctcccactgcagcctcgagtgcccctgtcccacctggctccccctgctggtgtctagtgtttttttccctctcctgtccttgtgttgaaggcagtaaactaagggtgtcaagccccattccctctctactcttgacagcaggattggatgttgtgtattgtggtttattttattttcttcattttgttctgaaattaaagtatgcaaaataaagaatatgccgtttttataca

SEQ ID NO: 2167 - DNA, 2589 bp, Homo sapiens; identical to SEQ ID NO: 2166

SEQ ID NO: 2168 - DNA, 2589 bp, Homo sapiens; identical to SEQ ID NO: 2166

SEQ ID NO: 2169 - DNA, 1575 bp, Homo sapiens
ctagcttttctcttctgtcaaccccacacgcctttggcacaatgaagtgggtaacctttatttcccttctttttctctttagctcggcttattccaggggtgtgtttcgtcgagatgcacacaagagtgaggttgctcatcggtttaaagatttgggagaagaaaatttcaaagccttggtgttgattgcctttgctcagtatcttcagcagtgtccatttgaagatcatgtaaaattagtgaatgaagtaactgaatttgcaaaaacatgtgttgctgatgagtcagctgaaaattgtgacaaatcacttcataccctttttggagacaaattatgcacagttgcaactcttcgtgaaacctatggtgaaatggctgactgctgtgcaaaacaagaacctgagagaaatgaatgcttcttgcaacacaaagatgacaacccaaacctcccccgattggtgagaccagaggttgatgtgatgtgcactgcttttcatgacaatgaagagacatttttgaaaaaacatatgaaaccactctagagaagtgctgtgccgctgcagatcctcatgaatgctatgccaaagtgttcgatgaatttaaacctcttgtggaagagcctcagaatttaatcaaacaaaattgtgagctttttgagcagcttggagagtacaaattccagaatgcgctattagttcgttacaccaagaaagtaccccaagtgtcaactccaactcttgtagaggtctcaagaaacctaggaaaagtgggcagcaaatgttgtaaacatcctgaagcaaaaagaatgccctgtgcagaagactatctatccgtggtcctgaaccagttatgtgtgttgcatgagaaaacgccagtaagtgacagagtcaccaaatgctgcacagaatccttggtgaacaggcgaccatgcttttcagctctggaagtcgatgaaacatacgttcccaaagagtttaatgctgaaacattcaccttccatgcagatatatgcacactttctgagaaggagagacaaatcaagaaacaaactgcacttgttgagctcgtgaaacacaagcccaaggcaacaaaagagcaactgaaagctgttatggatgatttcgcagcttttgtagagaagtgctgcaaggctgacgataaggagacctgctttgccgaggagggtaaaaaacttgttgctgcaagtcaagctgccttaggcttataacatcacatttaaaagcatctcagcctaccatgagaataagagaaagaaaatgaagatcaaaagcttattcatctgtttttctttttcgttggtgtaaagccaacaccctgtctaaaaaacataaatttctttaatcattttgcctcttttctctgtgcttcaattaataaaaaatggaaagaatctaatagagtggtacagcactgttatttttcaaagatgtgttgctatcctgaaaattctgtaggttctgtggaagttccagtgttctctcttattccacttcggtagaggatttctagtttcttgtgggctaattaaataaatcattaatactcttctaagtt

SEQ ID NO: 2170 - DNA, 2366 bp, Homo sapiens; identical to SEQ ID NO: 1542

SEQ ID NO: 2171 - DNA, 1592 bp, Homo sapiens
agcttttctcttctgtcaaccccacacgcctttggcacaatgaagtgggtaacctttatttcccttctttttctctttagctcggcttattccaggggtgtgtttcgtcgagatgcacacaagagtgaggttgctcatcggtttaaagatttgggagaagaaaatttcaaagccttggtgttgattgcctttgctcagtatcttcagcagtgtccatttgaagatcatgtaaaattagtgaatgaagtaactgaatttgcaaaaacatgtgttgctgatgagtcagctgaaaattgtgacaaatcacttcataccctttttggagacaaattatgcacagttgcaactcttcgtgaaacctatggtgaaatggctgactgctgtgcaaaacaagaacctgagagaaatgaatgcttcttgcaacacaaagatgacaacccaaacctcccccgattggtgagaccagaggttgatgtgatgtgcactgcttttcatgacaatgaagagacatttttgaaaaagtttttgtatgaatatgcaagaaggcatcctgattactctgtctgctgtgccgctgcagatcctcatgaatgctatgccaaagtgttcgatgaatttaaacctcttgtggaagagcctcagaatttaatcaaacaaaattgtgagctttttgagcagcttggagagtacaaattccagaatgcgctattagttcgttacaccaagaaagtaccccaagtgtcaactccaactcttgtagaggtctcaagaaacctaggaaaagtgggcagcaaatgttgtaaacatcctgaagcaaaaagaatgccctgtgcagaagactatctatccgtggtcctgaaccagttatgtgtgttgcatgagaaaacgccagtaagtgacagagtcaccaaatgctgcacagaatccttggtgaacaggcgaccatgcttttcagctctggaagtcgatgaaacatacgttcccaaagagtttaatgctgaaacattcaccttccatgcagatatatgcacactttctgagaaggagagacaaatcaagaaacaaactgcacttgttgagctcgtgaaacacaagcccaaggcaacaaaagagcaactgaaagctgttatggatgatttcgcagcttttgtagagaagtgctgcaaggctgacgataaggagacctgctttgccgaggagggtaaaaaacttgttgctgcaagtcaagctgccttaggcttataacatcacatttaaaagcatctcagcctaccatgagaataagagaaagaaaatgaagatcaaaagcttattcatctgtttttctttttcgttggtgtaaagccaacaccctgtctaaaaaacataaatttctttaatcattttgcctcttttctctgtgcttcaattaataaaaaatggaaagaatctaatagagtggtacagcactgttatttttcaaagatgtgttgctatcctgaaaattctgtaggttctgtggaagttccagtgttctctcttattccacttcggtagaggatttctagtttcttgtgggctaattaaataaatcattaatactcttctaagtt

SEQ ID NO: 2172 - DNA, 2106 bp, Homo sapiens; identical to SEQ ID NO: 1734

SEQ ID NO: 2173 - DNA, 4103 bp, Homo sapiens
ctcacagcccgaaactgcaaggagctcctctgcccggcctctctttactcctcctctctgcccctcagctcgctcatctttcttcccgccccctctcttttccttctttggttctttgaagtgatgagctagcgcaaccacaaaccatacattccttttgtagaaaaacccgtgcctcgaatgaggcgagactcagagaggacccaggcgcggggcggacccctccaattccttcctcgcgcccccgaaagagcggcgcaccagcagccgaactgccggcgcccaggctccctggtccggccgggatgcggccggtacccgctccccgccgggaacaacctctccactcttcctgcagggagctggtgccagccgacagccgcgccagggccgctccgggtaccagggtcggatcgggtgacgtcgcgaacttgcgcctggccgccaagccggcctccaggctgaagaaggacccgccccggccttgacccgggccccgcccctccagccggggcaccgagccccggccctagctgctcgcccctactcgccggcactcgcccggctcgcccgctttcgcacccagttcacgcgccacagctatgtgtccccgagccgcgcgggcgcccgcgacgctactcctcgccctgggcgcggtgctgtggcctgcggctggcgcctgggagcttacgattttgcacaccaacgacgtgcacagccggctggagcagaccagcgaggactccagcaagtgcgtcaacgccagccgctgcatgggtggcgtggctcggctcttcaccaaggttcagcagatccgccgcgccgaacccaacgtgctgctgctggacgccggcgaccagtaccagggcactatctggttcaccgtgtacaagggcgccgaggtggcgcacttcatgaacgccctgcgctacgatgccatggcactgggaaatcatgaatttgataatggtgtggaaggactgatcgagccactcctcaaagaggccaaatttccaattctgagtgcaaacattaaagcaaaggggccactagcatctcaaatatcaggactttatttgccatataaagttcttcctgttggtgatgaagttgtgggaatcgttggatacacttccaaagaaaccccttttctctcaaatccagggacaaatttagtgtttgaagatgaaatcactgcattacaacctgaagtagataagttaaaaactctaaatgtgaacaaaattattgcactgggacattcgggttttgaaatggataaactcatcgctcagaaagtgaggggtgtggacgtcgtggtgggaggacactccaacacatttctttacacaggcaatccaccttccaaagaggtgcctgctgggaagtacccattcatagtcacttctgatgatgggcggaaggttcctgtagtccaggcctatgcttttggcaaatacctaggctatctgaagatcgagtttgatgaaagaggaaacgtcatctcttcccatggaaatcccattcttctaaacagcagcattcctgaagatccaagcataaaagcagacattaacaaatggaggataaaattggataattattctacccaggaattagggaaaacaattgtctatctggatggctcctctcaatcatgccgctttagagaatgcaacatgggcaacctgatttgtgatgcaatgattaacaacaacctgagacacgcggatgaaatgttctggaaccacgtatccatgtgcattttaaatggaggtggtatccggtcgcccattgatgaacgcaacaatggcacaattacctgggagaacctggctgctgtattgccctttggaggcacatttgacctagtccagttaaaaggttccaccctgaagaaggcctttgagcatagcgtgcaccgctacggccagtccactggagagttcctgcaggtgggcggaatccatgtggtgtatgatctttcccgaaaacctggagacagagtagtcaaattagatgttctttgcaccaagtgtcgagtgcccagttatgaccctctcaaaatggacgaggtatataaggtgatcctcccaaacttcctggccaatggtggagatgggttccagatgataaaagatgaattattaagacatgactctggtgaccaagatatcaacgtggtttctacatatatctccaaaatgaaagtaatttatccagcagttgaaggtcggatcaagttttccacaggaagtcactgccatggaagcttttctttaatatttctttcactttgggcagtgatctttgttttataccaatagccaaaaattctccttgcctttaatgtgtgaaactgcattttttcaagtgagattcaaatctgccttttaggacctggctttgtgacagcaaaaaccatctttacaggctcctagaagctgaaggttagagcattataaaatgaagagacagacatgattactcagggtcagcaacctagtgagttagaaaaaaaattaacatagggccctataaggagaaagccaactatgttaagtttacgtgtccaaattttaatgaaattttactaacaattttaaaccatatttttcttcttcatatccatttctaatccatcaaacagcttatgtttacataaaattttatcattcacaaggaagttttaagcacactgtctcatttgatatccacaacttatttttggtaggaaagagagatgtttttcccacctgtcagatgaaaaaactgaagctcaaaaagggttgacttgaccatacagctaatgctgacagatccaagacctagacctaggtcttttgaactcaagtccagcattctcaactatatcaagttactgttcagaatacttaatatctcctctcttcataattatcaatagccccaagctcatggatgacaaatctctgctttatttcttgtctctattttttcactttatagctcctgttataatagcaagtttaatggtataaacacaggataccatcctctcttgcaacacccatgtgcctttgatgagtcaggtagcaagctgtagtagataatgagaaaggccagaggctgcaaaagacagtcaaaggacacgagagaaaggaaggggaagaacaggactccaggactgttttatattatagaaaagcaagagctaaagagcatttacacatgttaaacagatacttgttaagcatagtgcctgacacacggcattagctgttattttatgagattccatcagctctgcctctgtcctctttcttctaacatgaaggtatcatgagaagagaaccttctaacataagctgtaattctaaacctgcacttgtccctctccagcaagaggctagcactgaattcattctactcatactacacacccagttatggaatgtccagagttctcgaagaaaataaatgactttaggaagaggtatacattttttaagtcgctctgcctccaaatctgaacagtcactgtaaatcattcttaagcccagatatgagaacttctgctggaaagtgggaccctctgagtgggtggtcagaaaatacccatgctgatgaaatgacctatgcccaaagaacaaatacttaacgtgggagtggaaccacatgagcctgctcagctctgcataagtaattcaagaaatgggaggcttcaccttaaaaacagtgtgcaaatggcagctagaggttttgataggaagtatgtttgtttcttagtgtttacaaatattaagtactcttgatacaaaatatacttttaaacttcataacctttttataaaagttgttgcagcaaaataatagcctcggttctatgcatatatggattagctataaaaaatgtcaataagattgtacaaggaaaattagagaaaggcacatttagggtttattttttacacttggccagtaaaatagggtaaatcctattagaattttttaaagaactttttttaagtttcctaaatctgtgtgtgtattgtgaagtggtataagaaatgactttgaaccactttgcaattgtagattcccaacaataaaattgaagataa

SEQ ID NO: 2174 - DNA, 4103 bp, Homo sapiens; identical to SEQ ID NO: 2173

SEQ ID NO: 2175 - DNA, 5998 bp, Homo sapiens
agcgctcgagaaagtcctctcgggagaagcagcgcctgttcccggggcagatccaggttcaggtcctggctataagtcaccatggcacagcaagctgccgataagtatctctatgtggataaaaacttcatcaacaatccgctggcccaggccgactgggctgccaagaagctggtatgggtgccttccgacaagagtggctttgagccagccagcctcaaggaggaggtgggcgaagaggccatcgtggagctggtggagaatgggaagaaggtgaaggtgaacaaggatgacatccagaagatgaacccgcccaagttctccaaggtggaggacatggcagagctcacgtgcctcaacgaagcctcggtgctgcacaacctcaaggagcgttactactcagggctcatctacacctattcaggcctgttctgtgtggtcatcaatccttacaagaacctgcccatctactctgaagagattgtggaaatgtacaagggcaagaagaggcacgagatgccccctcacatctatgccatcacagacaccgcctacaggagtatgatgcaagaccgagaagatcaatccatcttgtgcactggtgaatctggagctggcaagacggagaacaccaagaaggtcatccagtatctggcgtacgtggcgtcctcgcacaagagcaagaaggaccagggcgagctggagcggcagctgctgcaggccaaccccatcctggaggccttcgggaacgccaagaccgtgaagaatgacaactcctcccgcttcggcaaattcattcgcatcaactttgatgtcaatggctacattgttggagccaacattgagacttatcttttggagaaatctcgtgctatccgccaagccaaggaagaacggaccttccacatcttctattatctcctgtctggggctggagagcacctgaagaccgatctcctgttggagccgtacaacaaataccgcttcctgtccaatggacacgtcaccatccccgggcagcaggacaaggacatgttccaggagaccatggaggccatgaggattatgggcatcccagaagaggagcaaatgggcctgctgcgggtcatctcaggggttcttcagctcggcaacatcgtcttcaagaaggagcggaacactgaccaggcgtccatgcccgacaacacagctgcccaaaaggtgtcccatctcttgggtatcaatgtgaccgatttcaccagaggaatcctcaccccgcgcatcaaggtgggacgggattacgtccagaaggcgcagactaaagagcaggctgactttgccatcgaggccttggccaaggcgacctatgagcggatgttccgctggctggtgctgcgcatcaacaaggctctggacaagaccaagaggcagggcgcctccttcatcgggatcctggacattgccggcttcgagatctttgatctgaactcgtttgagcagctgtgcatcaattacaccaatgagaagctgcagcagctcttcaaccacaccatgttcatcctggagcaggaggagtaccagcgcgagggcatcgagtggaacttcatcgactttggcctcgacctgcagccctgcatcgacctcattgagaagccagcaggccccccgggcattctggccctgctggacgaggagtgctggttccccaaagccaccgacaagagcttcgtggagaaggtgatgcaggagcagggcacccaccccaagttccagaagcccaagcagctgaaggacaaagctgatttctgcattatccactatgccggcaaggtggattacaaagctgacgagtggctgatgaagaacatggatcccctgaatgacaacatcgccacactgctccaccagtcctctgacaagtttgtctcggagctgtggaaggatgtggaccgcatcatcggcctggaccaggtggccggcatgtcggagaccgcactgcccggggccttcaagacgcggaagggcatgttccgcactgtggggcagctttacaaggagcagctggccaagctgatggctacgctgaggaacacgaaccccaactttgtccgctgcatcatccccaaccacgagaagaaggccggcaagctggacccgcatctcgtgctggaccagctgcgctgcaacggtgttctcgagggcatccgtatctgccgccagggcttccccaacagggtggtcttccaggagtttcggcagagatatgagatcctgactccaaactccattcccaagggtttcatggacgggaagcaggcgtgcgtgctcatgataaaagccctggagctcgacagcaatctgtaccgcattggccagagcaaagtcttcttccgtgccggtgtgctggcccacctggaggaggagcgagacctgaagatcaccgacgtcatcatagggttccaggcctgctgcaggggctacctggccaggaaagcatttgccaagcggcagcagcagcttaccgccatgaaggtcctccagcggaactgcgctgcctacctgaagctgcggaactggcagtggtggcggctcttcaccaaggtcaagccgctgctgcaggtgagccggcaggaggaggagatgatggccaaggaggaggagctggtgaaggtcagagagaagcagctggctgcggagaacaggctcacggagatggagacgctgcagtctcagctcatggcagagaaattgcagctgcaggagcagctccaggcagaaaccgagctgtgtgccgaggctgaggagctccgggcccgcctgaccgccaagaagcaggaattagaagagatctgccatgacctagaggccagggtggaggaggaggaggagcgctgccagcacctgcaggcggagaagaagaagatgcagcagaacatccaggagcttgaggagcagctggaggaggaggagagcgcccggcagaagctgcagctggagaaggtgaccaccgaggcgaagctgaaaaagctggaggaggagcagatcatcctggaggaccagaactgcaagctggccaaggaaaagaaactgctggaagacagaatagctgagttcaccaccaacctcacagaagaggaggagaaatctaagagcctcgccaagctcaagaacaagcatgaggcaatgatcactgacttggaagagcgcctccgcagggaggagaagcagcgacaggagctggagaagacccgccggaagctggagggagactccacagacctcagcgaccagatcgccgagctccaggcccagatcgcggagctcaagatgcagctggccaagaaagaggaggagctccaggccgccctggccagagtggaagaggaagctgcccagaagaacatggccctcaagaagatccgggagctggaatctcagatctctgaactccaggaagacctggagtctgagcgtgcttccaggaataaagctgagaagcagaaacgggaccttggggaagagctagaggcgctgaaaacagagttggaggacacgctggattccacagctgcccagcaggagctcaggtcaaaacgtgagcaggaggtgaacatcctgaagaagaccctggaggaggaggccaagacccacgaggcccagatccaggagatgaggcagaagcactcacaggccgtggaggagctggcggagcagctggagcagacgaagcgggtgaaagcaaacctcgagaaggcaaagcagactctggagaacgagcggggggagctggccaacgaggtgaaggtgctgctgcagggcaaaggggactcggagcacaagcgcaagaaagtggaggcgcagctgcaggagctgcaggtcaagttcaacgagggagagcgcgtgcgcacagagctggccgacaaggtcaccaagctgcaggtggagctggacaacgtgaccgggcttctcagccagtccgacagcaagtccagcaagctcaccaaggacttctccgcgctggagtcccagctgcaggacactcaggagctgctgcaggaggagaaccggcagaagctgagcctgagcaccaagctcaagcaggtggaggacgagaagaattccttccgggagcagctggaggaggaggaggaggccaagcacaacctggagaagcagatcgccaccctccatgcccaggtggccgacatgaaaaagaagatggaggacagtgtggggtgcctggaaactgctgaggaggtgaagaggaagctccagaaggacctggagggcctgagccagcggcacgaggagaaggtggccgcctacgacaagctggagaagaccaagacgcggctgcagcaggagctggacgacctgctggtggacctggaccaccagcgccagagcgcgtgcaacctggagaagaagcagaagaagtttgaccagctcctggcggaggagaagaccatctctgccaagtatgcagaggagcgcgaccgggctgaggcggaggcccgagagaaggagaccaaggctctgtcgctggcccgggccctggaggaagccatggagcagaaggcggagctggagcggctcaacaagcagttccgcacggagatggaggaccttatgagctccaaggatgatgtgggcaagagtgtccacgagctggagaagtccaagcgggccctagagcagcaggtggaggagatgaagacgcagctggaagagctggaggacgagctgcaggccaccgaagatgccaagctgcggttggaggtcaacctgcaggccatgaaggcccagttcgagcgggacctgcagggccgggacgagcagagcgaggagaagaagaagcagctggtcagacaggtgcgggagatggaggcagagctggaggacgagaggaagcagcgctcgatggcagtggccgcccggaagaagctggagatggacctgaaggacctggaggcgcacatcgactcggccaacaagaaccgggacgaagccatcaaacagctgcggaagctgcaggcccagatgaaggactgcatgcgcgagctggatgacacccgcgcctctcgtgaggagatcctggcccaggccaaagagaacgagaagaagctgaagagcatggaggccgagatgatccagttgcaggaggaactggcagccgcggagcgtgccaagcgccaggcccagcaggagcgggatgagctggctgacgagatcgccaacagcagcggcaaaggagccctggcgttagaggagaagcggcgtctggaggcccgcatcgcccagctggaggaggagctggaggaggagcagggcaacacggagctgatcaacgaccggctgaagaaggccaacctgcagatcgaccagatcaacaccgacctgaacctggagcgcagccacgcccagaagaacgagaatgctcggcagcagctggaacgccagaacaaggagcttaaggtcaagctgcaggagatggagggcactgtcaagtccaagtacaaggcctccatcaccgccctcgaggccaagattgcacagctggaggagcagctggacaacgagaccaaggagcgccaggcagcctgcaaacaggtgcgtcggaccgagaagaagctgaaggatgtgctgctgcaggtggatgacgagcggaggaacgccgagcagtacaaggaccaggccgacaaggcatctacccgcctgaagcagctcaagcggcagctggaggaggccgaagaggaggcccagcgggccaacgcctcccgccggaaactgcagcgcgagctggaggacgccactgagacggccgatgccatgaaccgcgaagtcagctccctaaagaacaagctcaggcgcggggacctgccgtttgtcgtgccccgccgaatggcccggaaaggcgccggggatggctccgacgaagaggtagatggcaaagcggatggggctgaggccaaacctgccgaataagcctcttctcctgcagcctgagatggatggacag

SEQ ID NO: 2176 - DNA, 7448 bp, Homo sapiens
cgcggttcctgggcagggcacggaaggctaagcaaggctgacctgctgcagctcccgcctcgtgcgctcgccccacccggccgccgcccgagcgctcgagaaagtcctctcgggagaagcagcgcctgttcccggggcagatccaggttcaggtcctggctataagtcaccatggcacagcaagctgccgataagtatctctatgtggataaaaacttcatcaacaatccgctggcccaggccgactgggctgccaagaagctggtatgggtgccttccgacaagagtggctttgagccagccagcctcaaggaggaggtgggcgaagaggccatcgtggagctggtggagaatgggaagaaggtgaaggtgaacaaggatgacatccagaagatgaacccgcccaagttctccaaggtggaggacatggcagagctcacgtgcctcaacgaagcctcggtgctgcacaacctcaaggagcgttactactcagggctcatctacacctattcaggcctgttctgtgtggtcatcaatccttacaagaacctgcccatctactctgaagagattgtggaaatgtacaagggcaagaagaggcacgagatgccccctcacatctatgccatcacagacaccgcctacaggagtatgatgcaagaccgagaagatcaatccatcttgtgcactggtgaatctggagctggcaagacggagaacaccaagaaggtcatccagtatctggcgtacgtggcgtcctcgcacaagagcaagaaggaccagggcgagctggagcggcagctgctgcaggccaaccccatcctggaggccttcgggaacgccaagaccgtgaagaatgacaactcctcccgcttcggcaaattcattcgcatcaactttgatgtcaatggctacattgttggagccaacattgagacttatcttttggagaaatctcgtgctatccgccaagccaaggaagaacggaccttccacatcttctattatctcctgtctggggctggagagcacctgaagaccgatctcctgttggagccgtacaacaaataccgcttcctgtccaatggacacgtcaccatccccgggcagcaggacaaggacatgttccaggagaccatggaggccatgaggattatgggcatcccagaagaggagcaaatgggcctgctgcgggtcatctcaggggttcttcagctcggcaacatcgtcttcaagaaggagcggaacactgaccaggcgtccatgcccgacaacacagctgcccaaaaggtgtcccatctcttgggtatcaatgtgaccgatttcaccagaggaatcctcaccccgcgcatcaaggtgggacgggattacgtccagaaggcgcagactaaagagcaggctgactttgccatcgaggccttggccaaggcgacctatgagcggatgttccgctggctggtgctgcgcatcaacaaggctctggacaagaccaagaggcagggcgcctccttcatcgggatcctggacattgccggcttcgagatctttgatctgaactcgtttgagcagctgtgcatcaattacaccaatgagaagctgcagcagctcttcaaccacaccatgttcatcctggagcaggaggagtaccagcgcgagggcatcgagtggaacttcatcgactttggcctcgacctgcagccctgcatcgacctcattgagaagccagcaggccccccgggcattctggccctgctggacgaggagtgctggttccccaaagccaccgacaagagcttcgtggagaaggtgatgcaggagcagggcacccaccccaagttccagaagcccaagcagctgaaggacaaagctgatttctgcattatccactatgccggcaaggtggattacaaagctgacgagtggctgatgaagaacatggatcccctgaatgacaacatcgccacactgctccaccagtcctctgacaagtttgtctcggagctgtggaaggatgtggaccgcatcatcggcctggaccaggtggccggcatgtcggagaccgcactgcccggggccttcaagacgcggaagggcatgttccgcactgtggggcagctttacaaggagcagctggccaagctgatggctacgctgaggaacacgaaccccaactttgtccgctgcatcatccccaaccacgagaagaaggccggcaagctggacccgcatctcgtgctggaccagctgcgctgcaacggtgttctcgagggcatccgtatctgccgccagggcttccccaacagggtggtcttccaggagtttcggcagagatatgagatcctgactccaaactccattcccaagggtttcatggacgggaagcaggcgtgcgtgctcatgataaaagccctggagctcgacagcaatctgtaccgcattggccagagcaaagtcttcttccgtgccggtgtgctggcccacctggaggaggagcgagacctgaagatcaccgacgtcatcatagggttccaggcctgctgcaggggctacctggccaggaaagcatttgccaagcggcagcagcagcttaccgccatgaaggtcctccagcggaactgcgctgcctacctgaagctgcggaactggcagtggtggcggctcttcaccaaggtcaagccgctgctgcaggtgagccggcaggaggaggagatgatggccaaggaggaggagctggtgaaggtcagagagaagcagctggctgcggagaacaggctcacggagatggagacgctgcagtctcagctcatggcagagaaattgcagctgcaggagcagctccaggcagaaaccgagctgtgtgccgaggctgaggagctccgggcccgcctgaccgccaagaagcaggaattagaagagatctgccatgacctagaggccagggtggaggaggaggaggagcgctgccagcacctgcaggcggagaagaagaagatgcagcagaacatccaggagcttgaggagcagctggaggaggaggagagcgcccggcagaagctgcagctggagaaggtgaccaccgaggcgaagctgaaaaagctggaggaggagcagatcatcctggaggaccagaactgcaagctggccaaggaaaagaaactgctggaagacagaatagctgagttcaccaccaacctcacagaagaggaggagaaatctaagagcctcgccaagctcaagaacaagcatgaggcaatgatcactgacttggaagagcgcctccgcagggaggagaagcagcgacaggagctggagaagacccgccggaagctggagggagactccacagacctcagcgaccagatcgccgagctccaggcccagatcgcggagctcaagatgcagctggccaagaaagaggaggagctccaggccgccctggccagagtggaagaggaagctgcccagaagaacatggccctcaagaagatccgggagctggaatctcagatctctgaactccaggaagacctggagtctgagcgtgcttccaggaataaagctgagaagcagaaacgggaccttggggaagagctagaggcgctgaaaacagagttggaggacacgctggattccacagctgcccagcaggagctcaggtcaaaacgtgagcaggaggtgaacatcctgaagaagaccctggaggaggaggccaagacccacgaggcccagatccaggagatgaggcagaagcactcacaggccgtggaggagctggcggagcagctggagcagacgaagcgggtgaaagcaaacctcgagaaggcaaagcagactctggagaacgagcggggggagctggccaacgaggtgaaggtgctgctgcagggcaaaggggactcggagcacaagcgcaagaaagtggaggcgcagctgcaggagctgcaggtcaagttcaacgagggagagcgcgtgcgcacagagctggccgacaaggtcaccaagctgcaggtggagctggacaacgtgaccgggcttctcagccagtccgacagcaagtccagcaagctcaccaaggacttctccgcgctggagtcccagctgcaggacactcaggagctgctgcaggaggagaaccggcagaagctgagcctgagcaccaagctcaagcaggtggaggacgagaagaattccttccgggagcagctggaggaggaggaggaggccaagcacaacctggagaagcagatcgccaccctccatgcccaggtggccgacatgaaaaagaagatggaggacagtgtggggtgcctggaaactgctgaggaggtgaagaggaagctccagaaggacctggagggcctgagccagcggcacgaggagaaggtggccgcctacgacaagctggagaagaccaagacgcggctgcagcaggagctggacgacctgctggtggacctggaccaccagcgccagagcgcgtgcaacctggagaagaagcagaagaagtttgaccagctcctggcggaggagaagaccatctctgccaagtatgcagaggagcgcgaccgggctgaggcggaggcccgagagaaggagaccaaggctctgtcgctggcccgggccctggaggaagccatggagcagaaggcggagctggagcggctcaacaagcagttccgcacggagatggaggaccttatgagctccaaggatgatgtgggcaagagtgtccacgagctggagaagtccaagcgggccctagagcagcaggtggaggagatgaagacgcagctggaagagctggaggacgagctgcaggccaccgaagatgccaagctgcggttggaggtcaacctgcaggccatgaaggcccagttcgagcgggacctgcagggccgggacgagcagagcgaggagaagaagaagcagctggtcagacaggtgcgggagatggaggcagagctggaggacgagaggaagcagcgctcgatggcagtggccgcccggaagaagctggagatggacctgaaggacctggaggcgcacatcgactcggccaacaagaaccgggacgaagccatcaaacagctgcggaagctgcaggcccagatgaaggactgcatgcgcgagctggatgacacccgcgcctctcgtgaggagatcctggcccaggccaaagagaacgagaagaagctgaagagcatggaggccgagatgatccagttgcaggaggaactggcagccgcggagcgtgccaagcgccaggcccagcaggagcgggatgagctggctgacgagatcgccaacagcagcggcaaaggagccctggcgttagaggagaagcggcgtctggaggcccgcatcgcccagctggaggaggagctggaggaggagcagggcaacacggagctgatcaacgaccggctgaagaaggccaacctgcagatcgaccagatcaacaccgacctgaacctggagcgcagccacgcccagaagaacgagaatgctcggcagcagctggaacgccagaacaaggagcttaaggtcaagctgcaggagatggagggcactgtcaagtccaagtacaaggcctccatcaccgccctcgaggccaagattgcacagctggaggagcagctggacaacgagaccaaggagcgccaggcagcctgcaaacaggtgcgtcggaccgagaagaagctgaaggatgtgctgctgcaggtggatgacgagcggaggaacgccgagcagtacaaggaccaggccgacaaggcatctacccgcctgaagcagctcaagcggcagctggaggaggccgaagaggaggcccagcgggccaacgcctcccgccggaaactgcagcgcgagctggaggacgccactgagacggccgatgccatgaaccgcgaagtcagctccctaaagaacaagctcaggcgcggggacctgccgtttgtcgtgccccgccgaatggcccggaaaggcgccggggatggctccgacgaagaggtagatggcaaagcggatggggctgaggccaaacctgccgaataagcctcttctcctgcagcctgagatggatggacagacagacaccacagcctccccttcccagaccccgcagcacgcctctccccaccttcttgggactgctgtgaacatgcctcctcctgccctccgccccgtccccccatcccgtttccctccaggtgttgttgagggcatttggcttcctctgctgcatccccttccagctccctcccctgctcagaatctgataccaaagagacatggcccgggcccaggcagagagccaccagcaggctcctcagccctctcttgccaaaaagcacaagatgttgaggcgagcagggcaggcccccggggaggggccagagttttctatgaatctatttttcttcagactgaggccttttggtagtcggagcccccgcagtcgtcagcctccctgacgtctgccaccagcgcccccactcctcctcctttctttgctgtttgcaatcacacgtggtgacctcacacacctctgccccttgggcctcccactcccatggctctgggcggtccagaaggagcaggccctgggcctccacctctgtgcagggcacagaaggctggggtggggggaggagtggattcctccccaccctgtcccaggcagcgccactgtccgctgtctccctcctgattctaaaatgtctcaagtgcaatgccccctcccctcctttaccgaggacagcctgcctctgccacagcaaggctgtcggggtcaagctggaaaggccagcagccttccagtggcttctcccaacactcttggggaccaaatatacttaatggttaagggacttgtcccaagtctgacagccagagcgttagaggggccagcggccctcccaggcgatcttgtgtctactctaggactgggcccgagggtggtttacctgcaccgttgactcagtatagtttaaaaatctgccacctgcacaggtatttttgaaagcaaaataaggttttcttttttcccctttcttgtaataaatgataaaattccgagtctttctcactgcctttgtttagaagagagtagctcgtcctcactggtctacactggttgccgaatttacttgtattcctaactgttttgtatatgctgcattgagacttacggcaagaaggcattttttttttttaaaggaaacaaactctcaaatcatgaagtgatataaaagctgcatatgcctacaaagctctgaattcaggtcccagttgctgtcacaaaggagtgagtgaaactcccaccctacccccttttttatataataaaagtgccttagcatgtgttgcagctgtcaccactacagtaagctggtttacagatgttttccactgagcatcacaataaagagaaccatgtgctacgagcc

SEQ ID NO: 2177 - DNA, 7448 bp, Homo sapiens; identical to SEQ ID NO: 2176

SEQ ID NO: 2178 - DNA, 1309 bp, Homo sapiens
cctcctctccgcgcggggcgggctccgcgccacgtgactccgcggccgggccgggacgcgacgggacgcgctgggaccggcgtcgggggtcgcggggaccatgcagcggaggtgggtcttcgtgctgctcgacgtgctgtgcttactggtcgcctccctgcccttcgctatcctgacgctggtgaacgccccgtacaagcgaggattttactgcggggatgactccatccggtacccctaccgtccagataccatcacccacgggctcatggctggggtcaccatcacggccaccgtcatccttgtctcggccggggaagcctacctggtgtacacagaccggctctattctcgctcggacttcaacaactacgtggctgctgtatacaaggtgctggggaccttcctgtttggggctgccgtgagccagtctctgacagacctggccaagtacatgattgggcgtctgaggcccaacttcctagccgtctgcgaccccgactggagccgggtcaactgctcggtctatgtgcagctggagaaggtgtgcaggggaaaccctgctgatgtcaccgaggccaggttgtctttctactcgggacactcttcctttgggatgtactgcatggtgttcttggtgctgtatgtgcaggcacgactctgttggaagtgggcacggctgctgcgacccacagtccagttcttcctggtggcctttgccctctacgtgggctacacccgcgtgtctgattacaaacaccactggagcgatgtccttgttggcctcctgcagggggcactggtggctgccctcactgtctgctacatctcagacttcttcaaagcccgacccccacagcactgtctgaaggaggaggagctggaacggaagcccagcctgtcactgacgttgaccctgggcgaggctgaccacaaccactatggatacccgcactcctcctcctgaggccggaccccgcccaggcagggagctgctgtgagtccagctgaggcccacccaggtggtccctccagccctggttaggcactgagggctctggacgggctccaggaaccctgggctgatgggagcagtgagcgggctccgctgccccctgccctgcactggaccaggagtctggagatgcctgggtagccctcagcatttggaggggaacctgttcccgtcggtccccaaatatccccttctttttatggggttaaggaagggaccgagagatcagatagttgctgttttgtaaaatgtaatgtatatgtggtttttagtaaaatagggcacctgtttcac

SEQ ID NO: 2179 - DNA, 2063 bp, Homo sapiens
aaactttactttttgtggagatgagtcctgctgtgttgtgtaggctggtcttgaactcctggcctcacgcaatccacccccaaccttggcctcccggagtgcagggattacaggtgtgagccacctttcccagcctgttgactcctttaattcagaggagtcagtcagattttagacatctcaaatgttgtatgttcaaaaccaaactcctggtcttttccccaaacttgtgtctccctgtcttgcccaatcagctgttgacacctccaatccttgcagttgctgcggccaaaactcagtcatccctcactcctttactgctctcaaacccacatccagcctagaaatgccatcccctccaccttcaaaatgcatccagaccccgccctttcttcgacacttggctgaccacaccctggtcctgtccacccttggctcctgtctggatgctcccagcagcctcctccctgggctcccttgccctgccccagtctgttccccacgcacagccgccaggggatcctgtaacacctgtgtttgtttcttcgggctgctgtaacaaattgccaccaagttggtggcttaacacaacagaatgtatggccaggcgcagtggctcctgcctgtaatcccagcactttgggaggccgagacagtcgatcatttgaagttgcaccactgcactccagcctggataacagagcgagactccgtcttaaaaaaaaaaaaaaaaaaaaaagacaacaaattcattctctcagttttggagccgaagtccaaactcaaggtgtagcagggccatgcgcctccagaagctggaggggagattccattcctcacctctcccagcttctagtggctccaggcattgctgggtttatggccacatcaccctaatgtcagcctccctgttcacatgaccttctgcctgttctatctctgaggacagttgtgattggatttagggcccatccagttagtccaggatgatctcatctcaagatcctaagtctgattacaattgcaaagatcctttttccaaataaggtcacatgcacgtaagttccggggattatgcttgcgtgggacacattttttttgaggccaccattcaacccactacaaaatccaactgaagcccagcgaagtggctcatgcctgaaatccccgcactgtgcgaggccaaggcgggagggtcacctgaggccaggagttcaagagtagcctgggcagcgtagggagatcctcatctcttttttttttcgagatggagtttcgttcttgttgctcaggctggagtgcaatggcgcaatcttggctcactatgacttcctcctcctgggttcgagcgattctcctgcctcagcaatcccgagtagctgggattacaggcatgtgccaccatgcccgtctctattaaggatgcaaaattggccaggcatggtggcacatgcctgtggtcccagctactcgggaggctgagacaggagaatcgttcgaatctgggaggcggaggttgcagtgggcctagatcgtgccattgcactgtagcctgggcaacaagagcgagactccgtctcaaaaaaaaaaaaaaaaaaaaaaactgcatgatcttgggcaactaacttaacctcccagcgcctcagttactgcatctgcaatatgggaatgaaaacacaaattaatcattctgcacataattcttaagcatgtactatatatgtgcccaacactgctagacactggggatacctcaatgaacaatacagacaaaaatatctcggcctggcgcagtggctcacgcctgtaatccaagcactttgggaggtgaagtgggtggatcgcctgagaccaggagtttgagaccagcctggacaacatggtgaagccccatctctactaaaggtgcaaaaattagccaggcatggtggcgcgcccctaaaatctgagcaactcgggaggctgaggtgagaggattgcttgagcccgggaggcggaggctgcagtgagttgagatcgcgccactgcactccagcctgggtgacagagtgagaccccatctc

SEQ ID NO: 2180 - DNA, 9962 bp, Homo sapiens
cagtttggagctcagtcttccaccaaaggccgttcagttctcctgggctccagcctcctgcaaggactgcaagagttttcctccgcagctctgagtctccacttttttggtggagaaaggctgcaaaaagaaaaagagacgcagtgagtgggaaaagtatgcatcctattcaaacctaattgaatcgaggagcccagggacacacgccttcaggtttgctcaggggttcatatttggtgcttagacaaattcaaaatgaggaaacatcggcacttgcccttagtggccgtcttttgcctctttctctcaggctttcctacaactcatgcccagcagcagcaagcagatgtcaaaaatggtgcggctgctgatataatatttctagtggattcctcttggaccattggagaggaacatttccaacttgttcgagagtttctatatgatgttgtaaaatccttagctgtgggagaaaatgatttccattttgctctggtccagttcaacggaaacccacataccgagttcctgttaaatacgtatcgtactaaacaagaagtcctttctcatatttccaacatgtcttatattgggggaaccaatcagactggaaaaggattagaatacataatgcaaagccacctcaccaaggctgctggaagccgggccggtgacggagtccctcaggttatcgtagtgttaactgatggacactcgaaggatggccttgctctgccctcagcggaacttaagtctgctgatgttaacgtgtttgcaattggagttgaggatgcagatgaaggagcgttaaaagaaatagcaagtgaaccgctcaatatgcatatgttcaacctagagaattttacctcacttcatgacatagtaggaaacttagtgtcctgtgtgcattcatccgtgagtccagaaagggctggggacacggaaacccttaaagacatcacagcacaagactctgctgacattattttccttattgatggatcaaacaacaccggaagtgtcaatttcgcagtcattctcgacttccttgtaaatctccttgagaaactcccaattggaactcagcagatccgagtgggggtggtccagtttagcgatgagcccagaaccatgttctccttggacacctactccaccaaggcccaggttctgggtgcagtgaaagccctcgggtttgctggtggggagttggccaatatcggcctcgcccttgatttcgtggtggagaaccacttcacccgggcagggggcagccgcgtggaggaaggggttccccaggtgctggtcctcataagtgccgggccttctagtgacgagattcgctacggggtggtagcactgaagcaggctagcgtgttctcattcggccttggagcccaggccgcctccagggcagagcttcagcacatagctaccgatgacaacttggtgtttactgtcccggaattccgtagctttggggacctccaggagaaattactgccgtacattgttggcgtggcccaaaggcacattgtcttgaaaccgccaaccattgtcacacaagtcattgaagtcaacaagagagacatagtcttcctggtggatggctcatctgcactgggactggccaacttcaatgccatccgagacttcattgctaaagtcatccagaggctggaaatcggacaggatcttatccaggtggcagtggcccagtatgcagacactgtgaggcctgaattttatttcaatacccatccaacaaaaagggaagtcataaccgctgtgcggaaaatgaagcccctggacggctcggccctgtacacgggctctgctctagactttgttcgtaacaacctattcacgagttcagccggctaccgggctgccgaggggattcctaagcttttggtgctgatcacaggtggtaagtccctagatgaaatcagccagcctgcccaggagctgaagagaagcagcataatggcctttgccattgggaacaagggtgccgatcaggctgagctggaagagatcgctttcgactcctccctggtgttcatcccagctgagttccgagccgccccattgcaaggcatgctgcctggcttgctggcacctctcaggaccctctctggaacccctgaagagagcaagcgagacattctgttcctctttgacggctcagccaatcttgtgggccagttccctgttgtccgtgactttctctacaagattatcgatgagctcaatgtgaagccagaggggacccgaattgcggtggctcagtacagcgatgatgtcaaggtggagtcccgttttgatgagcaccagagtaagcctgagatcctgaatcttgtgaagagaatgaagatcaagacgggcaaagccctcaacctgggctacgcgctggactatgcacagaggtacatttttgtgaagtctgctggcagccggatcgaggatggagtgcttcagttcctggtgctgctggtcgcaggaaggtcatctgaccgtgtggatgggccagcaagtaacctgaagcagagtggggttgtgcctttcatcttccaagccaagaacgcagaccctgctgagttagagcagatcgtgctgtctccagcgtttatcctggctgcagagtcgcttcccaagattggagatcttcatccacagatagtgaatctcttaaaatcagtgcacaacggagcaccagcaccagtttcaggtgaaaaggacgtggtgtttctgcttgatggctctgagggcgtcaggagcggcttccctctgttgaaagagtttgtccagagagtggtggaaagcctggatgtgggccaggaccgggtccgcgtggccgtggtgcagtacagcgaccggaccaggcccgagttctacctgaattcatacatgaacaagcaggacgtcgtcaacgctgtccgccagctgaccctgctgggagggccgacccccaacaccggggccgccctggagtttgtcctgaggaacatcctggtcagctctgcgggaagcaggataacagaaggtgtgccccagctgctgatcgtcctcacggccgacaggtctggggatgatgtgcggaacccctccgtggtcgtgaagaggggtggggctgtgcccattggcattggcatcgggaacgctgacatcacagagatgcagaccatctccttcatcccggactttgccgtggccattcccacctttcgccagctggggaccgtccaacaggtcatctctgagagggtgacccagctcacccgcgaggagctgagcaggctgcagccggtgttgcagcctctaccgagcccaggtgttggtggcaagagggacgtggtctttctcatcgatgggtcccaaagtgccgggcctgagttccagtacgttcgcaccctcatagagaggctggttgactacctggacgtgggctttgacaccacccgggtggctgtcatccagttcagcgatgaccccaaggtggagttcctgctgaacgcccattccagcaaggatgaagtgcagaacgcggtgcagcggctgaggcccaagggagggcggcagatcaacgtgggcaatgccctggagtacgtgtccaggaacatcttcaagaggcccctggggagccgcattgaagagggcgtcccgcagttcctggtcctcatctcgtctggaaagtctgacgatgaggtggacgacccggcggtggagctcaagcagtttggcgtggcccctttcacgatcgccaggaacgcagaccaggaggagctggtgaagatctcgctgagccccgaatatgtgttctcggtgagcaccttccgggagctgcccagcctggagcagaaactgctgacgcccatcacgaccctgacctcagagcagatccagaagctcttagccagcactcgctatccacctccagcagttgagagtgatgctgcagacattgtctttctgatcgacagctctgagggagttaggccagatggctttgcacatattcgagattttgttagcaggattgttcgaagactcaacatcggccccagtaaagtgagagttggggtcgtgcagttcagcaatgatgtcttcccagaattctatctgaaaacctacagatcccaggccccggtgctggacgccatacggcgcctgaggctcagaggggggtccccactgaacactggcaaggctctcgaatttgtggcaagaaacctctttgttaagtctgcggggagtcgcatagaagacggggtgccccaacacctggtcctggtcctgggtggaaaatcccaggacgatgtgtccaggttcgcccaggtgatccgttcctcgggcattgtgagtttaggggtaggagaccggaacatcgacagaacagagctgcagaccatcaccaatgaccccagactggtcttcacagtgcgagagttcagagagcttcccaacatagaagaaagaatcatgaactcgtttggaccctccgcagccactcctgcacctccaggggtggacacccctcctccttcacggccagagaagaagaaagcagacattgtgttcctgttggatggttccatcaacttcaggagggacagtttccaggaagtgcttcgttttgtgtctgaaatagtggacacagtttatgaagatggcgactccatccaagtggggcttgtccagtacaactctgaccccactgacgaattcttcctgaaggacttctctaccaagaggcagattattgacgccatcaacaaagtggtctacaaagggggaagacacgccaacactaaggtgggccttgagcacctgcgggtaaaccactttgtgcctgaggcaggcagccgcctggaccagcgggtccctcagattgcctttgtgatcacgggaggaaagtcggtggaagatgcacaggatgtgagcctggccctcacccagaggggggtcaaagtgtttgctgttggagtgaggaatatcgactcggaggaggttggaaagatagcgtccaacagcgccacagcgttccgcgtgggcaacgtccaggagctgtccgaactgagcgagcaagttttggaaactttgcatgatgcgatgcatgaaaccctttgccctggtgtaactgatgctgccaaagcttgtaatctggatgtgattctggggtttgatggttctagagaccagaatgtttttgtggcccagaagggcttcgagtccaaggtggacgccatcttgaacagaatcagccagatgcacagggtcagctgcagcggtggccgctcgcccaccgtgcgtgtgtcagtggtggccaacacgccctcgggcccggtggaggcctttgactttgacgagtaccagccagagatgctcgagaagttccggaacatgcgcagccagcacccctacgtcctcacggaggacaccctgaaggtctacctgaacaagttcagacagtcctcgccggacagcgtgaaggtggtcattcattttactgatggagcagacggagatctggctgatttacacagagcatctgagaacctccgccaagaaggagtccgtgccttgatcctggtgggccttgaacgagtggtcaacttggagcggctaatgcatctggagtttgggcgagggtttatgtatgacaggcccctgaggcttaacttgctggacttggattatgaactagcggagcagcttgacaacattgccgagaaagcttgctgtggggttccctgcaagtgctctgggcagaggggagaccgcgggcccatcggcagcatcgggccaaagggtattcctggagaagacggctaccgaggctatcctggtgatgagggtggacccggtgagcgtggtccgcctggtgtgaacggcactcaaggtttccagggctgcccgggccagagaggagtaaagggctctcggggattcccaggagagaagggcgaagtaggagaaattggactggatggtctggatggtgaagatggagacaaaggattgcctggttcttctggagagaaagggaatcctggaagaaggggtgataaaggacctcgaggagagaaaggagaaagaggagatgttgggattcgaggggacccgggtaacccaggacaagacagccaggagagaggacccaaaggagaaaccggtgacctcggccccatgggtgtcccagggagagatggagtacctggaggacctggagaaactgggaagaatggtggctttggccgaaggggaccccccggagctaagggcaacaagggcggtcctggccagccgggctttgagggagagcaggggaccagaggtgcacagggcccagctggtcctgctggtcctccagggctgataggagaacaaggcatttctggacctcggggaagcggaggtgccgctggtgctcctggagaacgaggcagaaccggtccactgggaagaaagggtgagcccggagagccaggaccaaaaggaggaatcgggaaccggggccctcgtggggagacgggagatgacgggagagacggagttggcagtgaaggacgcagaggcaaaaaaggagaaagaggattccctggatacccaggaccaaagggtaacccaggtgaacctgggctaaatggaacaacaggacccaaaggcatcagaggccgaaggggaaattcgggacctccagggatagttggacagaagggagaccctggctacccaggaccagctggtcccaagggcaacaggggcgactccatcgatcaatgtgccctcatccaaagcatcaaagataaatgcccttgctgttacgggcccctggagtgccccgtcttcccaacagaactagcctttgctttagacacctctgagggagtcaaccaagacactttcggccggatgcgagatgtggtcttgagtattgtgaatgacctgaccattgctgagagcaactgcccacggggggcccgggtggctgtggtcacctacaacaacgaggtgaccacggagatccggtttgctgactccaagaggaagtcggtcctcctggacaagattaagaaccttcaggtggctctgacatccaaacagcagagtctggagactgccatgtcgtttgtggccaggaacacatttaagcgtgtgaggaacggattcctaatgaggaaagtggctgttttcttcagcaacacacccacaagagcatccccacagctcagagaggctgtgctcaagctctcagatgcggggatcacccccttgttccttacaaggcaggaagaccggcagctcatcaacgctttgcagatcaataacacagcagtggggcatgcgcttgtcctgcctgcagggagagacctcacagacttcctggagaatgtcctcacgtgtcatgtttgcttggacatctgcaacatcgacccatcctgtggatttggcagttggaggccttccttcagggacaggagagcggcagggagcgatgtggacatcgacatggctttcatcttagacagcgctgagaccaccaccctgttccagttcaatgagatgaagaagtacatagcgtacctggtcagacaactggacatgagcccagatcccaaggcctcccagcacttcgccagagtggcagttgtgcagcacgcgccctctgagtccgtggacaatgccagcatgccacctgtgaaggtggaattctccctgactgactatggctccaaggagaagctggtggacttcctcagcaggggaatgacacagttgcagggaaccagggccttaggcagtgccattgaatacaccatagagaatgtctttgaaagtgccccaaacccacgggacctgaaaattgtggtcctgatgctgacgggcgaggtgccggagcagcagctggaggaggcccagagagtcatcctgcaggccaaatgcaagggctacttcttcgtggtcctgggcattggcaggaaggtgaacatcaaggaggtatacaccttcgccagtgagccaaacgacgtcttcttcaaattagtggacaagtccaccgagctcaacgaggagcctttgatgcgcttcgggaggctgttgccatccttcgtcagcagtgaaaatgctttttacttgtccccagatatcaggaaacagtgtgattggttccaaggggaccaacccacaaagaaccttgtgaagtttggtcacaaacaagtaaatgttccgaataacgttacttcaagtcctacatccaacccagtgacgacaacgaagccggtgactacgacgaagccggtgaccaccacaacaaagcctgtaaccaccacaacaaagcctgtgactattataaatcagccatctgtgaagccagccgctgcaaagccggcccctgcgaaacctgtggctgccaagcctgtggccacaaagatggccactgttagacccccagtggcggtgaagccagcaacggcagcgaagcctgtagcagcaaagccagcagctgtaagaccccccgctgctgctgctgcaaaaccagtggcgaccaagcctgaggtccctaggccacaggcagccaaaccagctgccaccaagccagccaccactaagcccatggttaagatgtcccgtgaagtccaggtgtttgagataacagagaacagcgccaaactccactgggagagggctgagccccccggtccttatttttatgacctcaccgtcacctcagcccatgatcagtccctggttctgaagcagaacctcacggtcacggaccgcgtcattggaggcctgctcgctgggcagacataccatgtggctgtggtctgctacctgaggtctcaggtcagagccacctaccacggaagtttcagtacaaagaaatctcagcccccacctccacagccagcaaggtcagcttctagttcaaccatcaatctaatggtgagcacagaaccattggctctcactgaaacagatatatgcaagttgccgaaagacgaaggaacttgcagggatttcatattaaaatggtactatgatccaaacaccaaaagctgtgcaagattctggtatggaggttgtggtggaaacgaaaacaaatttggatcacagaaagaatgtgaaaaggtttgcgctcctgtgctcgccaaacccggagtcatcagtgtgatgggaacctaagcgtgggtggccaacatcatatacctcttgaagaagaaggagtcagccatcgccaacttgtctctgtagaagctccgggtgtagattcccttgcactgtatcatttcatgctttgatttacactcgaactcgggagggaacatcctgctgcatgacctatcagtatggtgctaatgtgtctgtggaccctcgctctctgtctccaggcagttctctcgaatactttgaatgttgtgtaacagttagccactgctggtgtttatgtgaacattcctatcaatccaaattccctctggagtttcatgttatgcctgttgcaggcaaatgtaaagtctagaaaataatgcaaatgtcacggctactctatatacttttgcttggttcattttttttcccttttagttaagcatgactttagatgggaagcctgtgtatcgtggagaaacaagagaccaactttttcattccctgcccccaatttcccagactagatttcaagctaattttctttttctgaagcctctaacaaatgatctagttcagaaggaagcaaaatcccttaatctatgtgcaccgttgggaccaatgccttaattaaagaatttaaaaaagttgtaatagagaatatttttggcattcctctaatgttgtgtgttttttttttgtgtgtgctggagggaggggatttaattttaattttaaaatgtttaggaaatttatacaaagaaactttttaataaagtatattgaaagttaaaaaaaaaaaaaaaaaa

SEQ ID NO: 2181 - DNA, 9959 bp, Homo sapiens
cagtttggagctcagtcttccaccaaaggccgttcagttctcctgggctccagcctcctgcaaggactgcaagagttttcctccgcagctctgagtctccacttttttggtggagaaaggctgcaaaaagaaaaagagacgcagtgagtgggaaaagtatgcatcctattcaaacctaattgaatcgaggagcccagggacacacgccttcaggtttgctcaggggttcatatttggtgcttagacaaattcaaaatgaggaaacatcggcacttgcccttagtggccgtcttttgcctctttctctcaggctttcctacaactcatgcccagcagcagcaagcagatgtcaaaaatggtgcggctgctgatataatatttctagtggattcctcttggaccattggagaggaacatttccaacttgttcgagagtttctatatgatgttgtaaaatccttagctgtgggagaaaatgatttccattttgctctggtccagttcaacggaaacccacataccgagttcctgttaaatacgtatcgtactaaacaagaagtcctttctcatatttccaacatgtcttatattgggggaaccaatcagactggaaaaggattagaatacataatgcaaagccacctcaccaaggctgctggaagccgggccggtgacggagtccctcaggttatcgtagtgttaactgatggacactcgaaggatggccttgctctgccctcagcggaacttaagtctgctgatgttaacgtgtttgcaattggagttgaggatgcagatgaaggagcgttaaaagaaatagcaagtgaaccgctcaatatgcatatgttcaacctagagaattttacctcacttcatgacatagtaggaaacttagtgtcctgtgtgcattcatccgtgagtccagaaagggctggggacacggaaacccttaaagacatcacagtcattgaagtcaacaagagagacatagtcttcctggtggatggctcatctgcactgggactggccaacttcaatgccatccgagacttcattgctaaagtcatccagaggctggaaatcggacaggatcttatccaggtggcagtggcccagtatgcagacactgtgaggcctgaattttatttcaatacccatccaacaaaaagggaagtcataaccgctgtgcggaaaatgaagcccctggacggctcggccctgtacacgggctctgctctagactttgttcgtaacaacctattcacgagttcagccggctaccgggctgccgaggggattcctaagcttttggtgctgatcacaggtggtaagtccctagatgaaatcagccagcctgcccaggagctgaagagaagcagcataatggcctttgccattgggaacaagggtgccgatcaggctgagctggaagagatcgctttcgactcctccctggtgttcatcccagctgagttccgagccgccccattgcaaggcatgctgcctggcttgctggcacctctcaggaccctctctggaacccctgaagttcactcaaacaaaagggatatcatctttcttttggatggatcagccaacgttggaaaaaccaatttcccttatgtgcgcgactttgtaatgaacctagttaacagccttgatattggaaatgacaatattcgtgttggtttagtgcaatttagtgacactcctgtaacggagttctctttaaacacataccagaccaagtcagatatccttggtcatctgaggcagctgcagctccagggaggttcgggcctgaacacaggctcagccctaagctatgtctatgccaaccacttcacggaagctggcggcagcaggatccgtgaacacgtgccgcagctcctgcttctgctcacagctgggcagtctgaggactcctatttgcaagctgccaacgccttgacacgcgcgggcatcctgactttttgtgtgggagctagccaggcgaataaggcagagcttgagcagattgcttttaacccaagcctggtgtatctcatggatgatttcagctccctgccagctttgcctcagcagctgattcagcccctaaccacatatgttagtggaggtgtggaggaagtaccactcgctcagccagagagcaagcgagacattctgttcctctttgacggctcagccaatcttgtgggccagttccctgttgtccgtgactttctctacaagattatcgatgagctcaatgtgaagccagaggggacccgaattgcggtggctcagtacagcgatgatgtcaaggtggagtcccgttttgatgagcaccagagtaagcctgagatcctgaatcttgtgaagagaatgaagatcaagacgggcaaagccctcaacctgggctacgcgctggactatgcacagaggtacatttttgtgaagtctgctggcagccggatcgaggatggagtgcttcagttcctggtgctgctggtcgcaggaaggtcatctgaccgtgtggatgggccagcaagtaacctgaagcagagtggggttgtgcctttcatcttccaagccaagaacgcagaccctgctgagttagagcagatcgtgctgtctccagcgtttatcctggctgcagagtcgcttcccaagattggagatcttcatccacagatagtgaatctcttaaaatcagtgcacaacggagcaccagcaccagtttcaggtgaaaaggacgtggtgtttctgcttgatggctctgagggcgtcaggagcggcttccctctgttgaaagagtttgtccagagagtggtggaaagcctggatgtgggccaggaccgggtccgcgtggccgtggtgcagtacagcgaccggaccaggcccgagttctacctgaattcatacatgaacaagcaggacgtcgtcaacgctgtccgccagctgaccctgctgggagggccgacccccaacaccggggccgccctggagtttgtcctgaggaacatcctggtcagctctgcgggaagcaggataacagaaggtgtgccccagctgctgatcgtcctcacggccgacaggtctggggatgatgtgcggaacccctccgtggtcgtgaagaggggtggggctgtgcccattggcattggcatcgggaacgctgacatcacagagatgcagaccatctccttcatcccggactttgccgtggccattcccacctttcgccagctggggaccgtccaacaggtcatctctgagagggtgacccagctcacccgcgaggagctgagcaggctgcagccggtgttgcagcctctaccgagcccaggtgttggtggcaagagggacgtggtctttctcatcgatgggtcccaaagtgccgggcctgagttccagtacgttcgcaccctcatagagaggctggttgactacctggacgtgggctttgacaccacccgggtggctgtcatccagttcagcgatgaccccaaggtggagttcctgctgaacgcccattccagcaaggatgaagtgcagaacgcggtgcagcggctgaggcccaagggagggcggcagatcaacgtgggcaatgccctggagtacgtgtccaggaacatcttcaagaggcccctggggagccgcattgaagagggcgtcccgcagttcctggtcctcatctcgtctggaaagtctgacgatgaggtggacgacccggcggtggagctcaagcagtttggcgtggcccctttcacgatcgccaggaacgcagaccaggaggagctggtgaagatctcgctgagccccgaatatgtgttctcggtgagcaccttccgggagctgcccagcctggagcagaaactgctgacgcccatcacgaccctgacctcagagcagatccagaagctcttagccagcactcgctatccacctccagcagttgagagtgatgctgcagacattgtctttctgatcgacagctctgagggagttaggccagatggctttgcacatattcgagattttgttagcaggattgttcgaagactcaacatcggccccagtaaagtgagagttggggtcgtgcagttcagcaatgatgtcttcccagaattctatctgaaaacctacagatcccaggccccggtgctggacgccatacggcgcctgaggctcagaggggggtccccactgaacactggcaaggctctcgaatttgtggcaagaaacctctttgttaagtctgcggggagtcgcatagaagacggggtgccccaacacctggtcctggtcctgggtggaaaatcccaggacgatgtgtccaggttcgcccaggtgatccgttcctcgggcattgtgagtttaggggtaggagaccggaacatcgacagaacagagctgcagaccatcaccaatgaccccagactggtcttcacagtgcgagagttcagagagcttcccaacatagaagaaagaatcatgaactcgtttggaccctccgcagccactcctgcacctccaggggtggacacccctcctccttcacggccagagaagaagaaagcagacattgtgttcctgttggatggttccatcaacttcaggagggacagtttccaggaagtgcttcgttttgtgtctgaaatagtggacacagtttatgaagatggcgactccatccaagtggggcttgtccagtacaactctgaccccactgacgaattcttcctgaaggacttctctaccaagaggcagattattgacgccatcaacaaagtggtctacaaagggggaagacacgccaacactaaggtgggccttgagcacctgcgggtaaaccactttgtgcctgaggcaggcagccgcctggaccagcgggtccctcagattgcctttgtgatcacgggaggaaagtcggtggaagatgcacaggatgtgagcctggccctcacccagaggggggtcaaagtgtttgctgttggagtgaggaatatcgactcggaggaggttggaaagatagcgtccaacagcgccacagcgttccgcgtgggcaacgtccaggagctgtccgaactgagcgagcaagttttggaaactttgcatgatgcgatgcatgaaaccctttgccctggtgtaactgatgctgccaaagcttgtaatctggatgtgattctggggtttgatggttctagagaccagaatgtttttgtggcccagaagggcttcgagtccaaggtggacgccatcttgaacagaatcagccagatgcacagggtcagctgcagcggtggccgctcgcccaccgtgcgtgtgtcagtggtggccaacacgccctcgggcccggtggaggcctttgactttgacgagtaccagccagagatgctcgagaagttccggaacatgcgcagccagcacccctacgtcctcacggaggacaccctgaaggtctacctgaacaagttcagacagtcctcgccggacagcgtgaaggtggtcattcattttactgatggagcagacggagatctggctgatttacacagagcatctgagaacctccgccaagaaggagtccgtgccttgatcctggtgggccttgaacgagtggtcaacttggagcggctaatgcatctggagtttgggcgagggtttatgtatgacaggcccctgaggcttaacttgctggacttggattatgaactagcggagcagcttgacaacattgccgagaaagcttgctgtggggttccctgcaagtgctctgggcagaggggagaccgcgggcccatcggcagcatcgggccaaagggtattcctggagaagacggctaccgaggctatcctggtgatgagggtggacccggtgagcgtggtccgcctggtgtgaacggcactcaaggtttccagggctgcccgggccagagaggagtaaagggctctcggggattcccaggagagaagggcgaagtaggagaaattggactggatggtctggatggtgaagatggagacaaaggattgcctggttcttctggagagaaagggaatcctggaagaaggggtgataaaggacctcgaggagagaaaggagaaagaggagatgttgggattcgaggggacccgggtaacccaggacaagacagccaggagagaggacccaaaggagaaaccggtgacctcggccccatgggtgtcccagggagagatggagtacctggaggacctggagaaactgggaagaatggtggctttggccgaaggggaccccccggagctaagggcaacaagggcggtcctggccagccgggctttgagggagagcaggggaccagaggtgcacagggcccagctggtcctgctggtcctccagggctgataggagaacaaggcatttctggacctcggggaagcggaggtgccgctggtgctcctggagaacgaggcagaaccggtccactgggaagaaagggtgagcccggagagccaggaccaaaaggaggaatcgggaaccggggccctcgtggggagacgggagatgacgggagagacggagttggcagtgaaggacgcagaggcaaaaaaggagaaagaggattccctggatacccaggaccaaagggtaacccaggtgaacctgggctaaatggaacaacaggacccaaaggcatcagaggccgaaggggaaattcgggacctccagggatagttggacagaagggagaccctggctacccaggaccagctggtcccaagggcaacaggggcgactccatcgatcaatgtgccctcatccaaagcatcaaagataaatgcccttgctgttacgggcccctggagtgccccgtcttcccaacagaactagcctttgctttagacacctctgagggagtcaaccaagacactttcggccggatgcgagatgtggtcttgagtattgtgaatgacctgaccattgctgagagcaactgcccacggggggcccgggtggctgtggtcacctacaacaacgaggtgaccacggagatccggtttgctgactccaagaggaagtcggtcctcctggacaagattaagaaccttcaggtggctctgacatccaaacagcagagtctggagactgccatgtcgtttgtggccaggaacacatttaagcgtgtgaggaacggattcctaatgaggaaagtggctgttttcttcagcaacacacccacaagagcatccccacagctcagagaggctgtgctcaagctctcagatgcggggatcacccccttgttccttacaaggcaggaagaccggcagctcatcaacgctttgcagatcaataacacagcagtggggcatgcgcttgtcctgcctgcagggagagacctcacagacttcctggagaatgtcctcacgtgtcatgtttgcttggacatctgcaacatcgacccatcctgtggatttggcagttggaggccttccttcagggacaggagagcggcagggagcgatgtggacatcgacatggctttcatcttagacagcgctgagaccaccaccctgttccagttcaatgagatgaagaagtacatagcgtacctggtcagacaactggacatgagcccagatcccaaggcctcccagcacttcgccagagtggcagttgtgcagcacgcgccctctgagtccgtggacaatgccagcatgccacctgtgaaggtggaattctccctgactgactatggctccaaggagaagctggtggacttcctcagcaggggaatgacacagttgcagggaaccagggccttaggcagtgccattgaatacaccatagagaatgtctttgaaagtgccccaaacccacgggacctgaaaattgtggtcctgatgctgacgggcgaggtgccggagcagcagctggaggaggcccagagagtcatcctgcaggccaaatgcaagggctacttcttcgtggtcctgggcattggcaggaaggtgaacatcaaggaggtatacaccttcgccagtgagccaaacgacgtcttcttcaaattagtggacaagtccaccgagctcaacgaggagcctttgatgcgcttcgggaggctgttgccatccttcgtcagcagtgaaaatgctttttacttgtccccagatatcaggaaacagtgtgattggttccaaggggaccaacccacaaagaaccttgtgaagtttggtcacaaacaagtaaatgttccgaataacgttacttcaagtcctacatccaacccagtgacgacaacgaagccggtgactacgacgaagccggtgaccaccacaacaaagcctgtaaccaccacaacaaagcctgtgactattataaatcagccatctgtgaagccagccgctgcaaagccggcccctgcgaaacctgtggctgccaagcctgtggccacaaagatggccactgttagacccccagtggcggtgaagccagcaacggcagcgaagcctgtagcagcaaagccagcagctgtaagaccccccgctgctgctgctgcaaaaccagtggcgaccaagcctgaggtccctaggccacaggcagccaaaccagctgccaccaagccagccaccactaagcccatggttaagatgtcccgtgaagtccaggtgtttgagataacagagaacagcgccaaactccactgggagagggctgagccccccggtccttatttttatgacctcaccgtcacctcagcccatgatcagtccctggttctgaagcagaacctcacggtcacggaccgcgtcattggaggcctgctcgctgggcagacataccatgtggctgtggtctgctacctgaggtctcaggtcagagccacctaccacggaagtttcagtacaaagaaatctcagcccccacctccacagccagcaaggtcagcttctagttcaaccatcaatctaatggtgagcacagaaccattggctctcactgaaacagatatatgcaagttgccgaaagacgaaggaacttgcagggatttcatattaaaatggtactatgatccaaacaccaaaagctgtgcaagattctggtatggaggttgtggtggaaacgaaaacaaatttggatcacagaaagaatgtgaaaaggtttgcgctcctgtgctcgccaaacccggagtcatcagtgtgatgggaacctaagcgtgggtggccaacatcatatacctcttgaagaagaaggagtcagccatcgccaacttgtctctgtagaagctccgggtgtagattcccttgcactgtatcatttcatgctttgatttacactcgaactcgggagggaacatcctgctgcatgacctatcagtatggtgctaatgtgtctgtggaccctcgctctctgtctccaggcagttctctcgaatactttgaatgttgtgtaacagttagccactgctggtgtttatgtgaacattcctatcaatccaaattccctctggagtttcatgttatgcctgttgcaggcaaatgtaaagtctagaaaataatgcaaatgtcacggctactctatatacttttgcttggttcattttttttcccttttagttaagcatgactttagatgggaagcctgtgtatcgtggagaaacaagagaccaactttttcattccctgcccccaatttcccagactagatttcaagctaattttctttttctgaagcctctaacaaatgatctagttcagaaggaagcaaaatcccttaatctatgtgcaccgttgggaccaatgccttaattaaagaatttaaaaaagttgtaatagagaatatttttggcattcctctaatgttgtgtgttttttttttgtgtgtgctggagggaggggatttaattttaattttaaaatgtttaggaaatttatacaaagaaactttttaataaagtatattgaaagttaaaaaaaaaaaaaaaaaa

SEQ ID NO: 2182 - DNA, 10562 bp, Homo sapiens
cagtttggagctcagtcttccaccaaaggccgttcagttctcctgggctccagcctcctgcaaggactgcaagagttttcctccgcagctctgagtctccacttttttggtggagaaaggctgcaaaaagaaaaagagacgcagtgagtgggaaaagtatgcatcctattcaaacctaattgaatcgaggagcccagggacacacgccttcaggtttgctcaggggttcatatttggtgcttagacaaattcaaaatgaggaaacatcggcacttgcccttagtggccgtcttttgcctctttctctcaggctttcctacaactcatgcccagcagcagcaagcagatgtcaaaaatggtgcggctgctgatataatatttctagtggattcctcttggaccattggagaggaacatttccaacttgttcgagagtttctatatgatgttgtaaaatccttagctgtgggagaaaatgatttccattttgctctggtccagttcaacggaaacccacataccgagttcctgttaaatacgtatcgtactaaacaagaagtcctttctcatatttccaacatgtcttatattgggggaaccaatcagactggaaaaggattagaatacataatgcaaagccacctcaccaaggctgctggaagccgggccggtgacggagtccctcaggttatcgtagtgttaactgatggacactcgaaggatggccttgctctgccctcagcggaacttaagtctgctgatgttaacgtgtttgcaattggagttgaggatgcagatgaaggagcgttaaaagaaatagcaagtgaaccgctcaatatgcatatgttcaacctagagaattttacctcacttcatgacatagtaggaaacttagtgtcctgtgtgcattcatccgtgagtccagaaagggctggggacacggaaacccttaaagacatcacagcacaagactctgctgacattattttccttattgatggatcaaacaacaccggaagtgtcaatttcgcagtcattctcgacttccttgtaaatctccttgagaaactcccaattggaactcagcagatccgagtgggggtggtccagtttagcgatgagcccagaaccatgttctccttggacacctactccaccaaggcccaggttctgggtgcagtgaaagccctcgggtttgctggtggggagttggccaatatcggcctcgcccttgatttcgtggtggagaaccacttcacccgggcagggggcagccgcgtggaggaaggggttccccaggtgctggtcctcataagtgccgggccttctagtgacgagattcgctacggggtggtagcactgaagcaggctagcgtgttctcattcggccttggagcccaggccgcctccagggcagagcttcagcacatagctaccgatgacaacttggtgtttactgtcccggaattccgtagctttggggacctccaggagaaattactgccgtacattgttggcgtggcccaaaggcacattgtcttgaaaccgccaaccattgtcacacaagtcattgaagtcaacaagagagacatagtcttcctggtggatggctcatctgcactgggactggccaacttcaatgccatccgagacttcattgctaaagtcatccagaggctggaaatcggacaggatcttatccaggtggcagtggcccagtatgcagacactgtgaggcctgaattttatttcaatacccatccaacaaaaagggaagtcataaccgctgtgcggaaaatgaagcccctggacggctcggccctgtacacgggctctgctctagactttgttcgtaacaacctattcacgagttcagccggctaccgggctgccgaggggattcctaagcttttggtgctgatcacaggtggtaagtccctagatgaaatcagccagcctgcccaggagctgaagagaagcagcataatggcctttgccattgggaacaagggtgccgatcaggctgagctggaagagatcgctttcgactcctccctggtgttcatcccagctgagttccgagccgccccattgcaaggcatgctgcctggcttgctggcacctctcaggaccctctctggaacccctgaagttcactcaaacaaaagggatatcatctttcttttggatggatcagccaacgttggaaaaaccaatttcccttatgtgcgcgactttgtaatgaacctagttaacagccttgatattggaaatgacaatattcgtgttggtttagtgcaatttagtgacactcctgtaacggagttctctttaaacacataccagaccaagtcagatatccttggtcatctgaggcagctgcagctccagggaggttcgggcctgaacacaggctcagccctaagctatgtctatgccaaccacttcacggaagctggcggcagcaggatccgtgaacacgtgccgcagctcctgcttctgctcacagctgggcagtctgaggactcctatttgcaagctgccaacgccttgacacgcgcgggcatcctgactttttgtgtgggagctagccaggcgaataaggcagagcttgagcagattgcttttaacccaagcctggtgtatctcatggatgatttcagctccctgccagctttgcctcagcagctgattcagcccctaaccacatatgttagtggaggtgtggaggaagtaccactcgctcagccagagagcaagcgagacattctgttcctctttgacggctcagccaatcttgtgggccagttccctgttgtccgtgactttctctacaagattatcgatgagctcaatgtgaagccagaggggacccgaattgcggtggctcagtacagcgatgatgtcaaggtggagtcccgttttgatgagcaccagagtaagcctgagatcctgaatcttgtgaagagaatgaagatcaagacgggcaaagccctcaacctgggctacgcgctggactatgcacagaggtacatttttgtgaagtctgctggcagccggatcgaggatggagtgcttcagttcctggtgctgctggtcgcaggaaggtcatctgaccgtgtggatgggccagcaagtaacctgaagcagagtggggttgtgcctttcatcttccaagccaagaacgcagaccctgctgagttagagcagatcgtgctgtctccagcgtttatcctggctgcagagtcgcttcccaagattggagatcttcatccacagatagtgaatctcttaaaatcagtgcacaacggagcaccagcaccagtttcaggtgaaaaggacgtggtgtttctgcttgatggctctgagggcgtcaggagcggcttccctctgttgaaagagtttgtccagagagtggtggaaagcctggatgtgggccaggaccgggtccgcgtggccgtggtgcagtacagcgaccggaccaggcccgagttctacctgaattcatacatgaacaagcaggacgtcgtcaacgctgtccgccagctgaccctgctgggagggccgacccccaacaccggggccgccctggagtttgtcctgaggaacatcctggtcagctctgcgggaagcaggataacagaaggtgtgccccagctgctgatcgtcctcacggccgacaggtctggggatgatgtgcggaacccctccgtggtcgtgaagaggggtggggctgtgcccattggcattggcatcgggaacgctgacatcacagagatgcagaccatctccttcatcccggactttgccgtggccattcccacctttcgccagctggggaccgtccaacaggtcatctctgagagggtgacccagctcacccgcgaggagctgagcaggctgcagccggtgttgcagcctctaccgagcccaggtgttggtggcaagagggacgtggtctttctcatcgatgggtcccaaagtgccgggcctgagttccagtacgttcgcaccctcatagagaggctggttgactacctggacgtgggctttgacaccacccgggtggctgtcatccagttcagcgatgaccccaaggtggagttcctgctgaacgcccattccagcaaggatgaagtgcagaacgcggtgcagcggctgaggcccaagggagggcggcagatcaacgtgggcaatgccctggagtacgtgtccaggaacatcttcaagaggcccctggggagccgcattgaagagggcgtcccgcagttcctggtcctcatctcgtctggaaagtctgacgatgaggtggacgacccggcggtggagctcaagcagtttggcgtggcccctttcacgatcgccaggaacgcagaccaggaggagctggtgaagatctcgctgagccccgaatatgtgttctcggtgagcaccttccgggagctgcccagcctggagcagaaactgctgacgcccatcacgaccctgacctcagagcagatccagaagctcttagccagcactcgctatccacctccagcagttgagagtgatgctgcagacattgtctttctgatcgacagctctgagggagttaggccagatggctttgcacatattcgagattttgttagcaggattgttcgaagactcaacatcggccccagtaaagtgagagttggggtcgtgcagttcagcaatgatgtcttcccagaattctatctgaaaacctacagatcccaggccccggtgctggacgccatacggcgcctgaggctcagaggggggtccccactgaacactggcaaggctctcgaatttgtggcaagaaacctctttgttaagtctgcggggagtcgcatagaagacggggtgccccaacacctggtcctggtcctgggtggaaaatcccaggacgatgtgtccaggttcgcccaggtgatccgttcctcgggcattgtgagtttaggggtaggagaccggaacatcgacagaacagagctgcagaccatcaccaatgaccccagactggtcttcacagtgcgagagttcagagagcttcccaacatagaagaaagaatcatgaactcgtttggaccctccgcagccactcctgcacctccaggggtggacacccctcctccttcacggccagagaagaagaaagcagacattgtgttcctgttggatggttccatcaacttcaggagggacagtttccaggaagtgcttcgttttgtgtctgaaatagtggacacagtttatgaagatggcgactccatccaagtggggcttgtccagtacaactctgaccccactgacgaattcttcctgaaggacttctctaccaagaggcagattattgacgccatcaacaaagtggtctacaaagggggaagacacgccaacactaaggtgggccttgagcacctgcgggtaaaccactttgtgcctgaggcaggcagccgcctggaccagcgggtccctcagattgcctttgtgatcacgggaggaaagtcggtggaagatgcacaggatgtgagcctggccctcacccagaggggggtcaaagtgtttgctgttggagtgaggaatatcgactcggaggaggttggaaagatagcgtccaacagcgccacagcgttccgcgtgggcaacgtccaggagctgtccgaactgagcgagcaagttttggaaactttgcatgatgcgatgcatgaaaccctttgccctggtgtaactgatgctgccaaagcttgtaatctggatgtgattctggggtttgatggttctagagaccagaatgtttttgtggcccagaagggcttcgagtccaaggtggacgccatcttgaacagaatcagccagatgcacagggtcagctgcagcggtggccgctcgcccaccgtgcgtgtgtcagtggtggccaacacgccctcgggcccggtggaggcctttgactttgacgagtaccagccagagatgctcgagaagttccggaacatgcgcagccagcacccctacgtcctcacggaggacaccctgaaggtctacctgaacaagttcagacagtcctcgccggacagcgtgaaggtggtcattcattttactgatggagcagacggagatctggctgatttacacagagcatctgagaacctccgccaagaaggagtccgtgccttgatcctggtgggccttgaacgagtggtcaacttggagcggctaatgcatctggagtttgggcgagggtttatgtatgacaggcccctgaggcttaacttgctggacttggattatgaactagcggagcagcttgacaacattgccgagaaagcttgctgtggggttccctgcaagtgctctgggcagaggggagaccgcgggcccatcggcagcatcgggccaaagggtattcctggagaagacggctaccgaggctatcctggtgatgagggtggacccggtgagcgtggtccgcctggtgtgaacggcactcaaggtttccagggctgcccgggccagagaggagtaaagggctctcggggattcccaggagagaagggcgaagtaggagaaattggactggatggtctggatggtgaagatggagacaaaggattgcctggttcttctggagagaaagggaatcctggaagaaggggtgataaaggacctcgaggagagaaaggagaaagaggagatgttgggattcgaggggacccgggtaacccaggacaagacagccaggagagaggacccaaaggagaaaccggtgacctcggccccatgggtgtcccagggagagatggagtacctggaggacctggagaaactgggaagaatggtggctttggccgaaggggaccccccggagctaagggcaacaagggcggtcctggccagccgggctttgagggagagcaggggaccagaggtgcacagggcccagctggtcctgctggtcctccagggctgataggagaacaaggcatttctggacctcggggaagcggaggtgccgctggtgctcctggagaacgaggcagaaccggtccactgggaagaaagggtgagcccggagagccaggaccaaaaggaggaatcgggaaccggggccctcgtggggagacgggagatgacgggagagacggagttggcagtgaaggacgcagaggcaaaaaaggagaaagaggattccctggatacccaggaccaaagggtaacccaggtgaacctgggctaaatggaacaacaggacccaaaggcatcagaggccgaaggggaaattcgggacctccagggatagttggacagaagggagaccctggctacccaggaccagctggtcccaagggcaacaggggcgactccatcgatcaatgtgccctcatccaaagcatcaaagataaatgcccttgctgttacgggcccctggagtgccccgtcttcccaacagaactagcctttgctttagacacctctgagggagtcaaccaagacactttcggccggatgcgagatgtggtcttgagtattgtgaatgacctgaccattgctgagagcaactgcccacggggggcccgggtggctgtggtcacctacaacaacgaggtgaccacggagatccggtttgctgactccaagaggaagtcggtcctcctggacaagattaagaaccttcaggtggctctgacatccaaacagcagagtctggagactgccatgtcgtttgtggccaggaacacatttaagcgtgtgaggaacggattcctaatgaggaaagtggctgttttcttcagcaacacacccacaagagcatccccacagctcagagaggctgtgctcaagctctcagatgcggggatcacccccttgttccttacaaggcaggaagaccggcagctcatcaacgctttgcagatcaataacacagcagtggggcatgcgcttgtcctgcctgcagggagagacctcacagacttcctggagaatgtcctcacgtgtcatgtttgcttggacatctgcaacatcgacccatcctgtggatttggcagttggaggccttccttcagggacaggagagcggcagggagcgatgtggacatcgacatggctttcatcttagacagcgctgagaccaccaccctgttccagttcaatgagatgaagaagtacatagcgtacctggtcagacaactggacatgagcccagatcccaaggcctcccagcacttcgccagagtggcagttgtgcagcacgcgccctctgagtccgtggacaatgccagcatgccacctgtgaaggtggaattctccctgactgactatggctccaaggagaagctggtggacttcctcagcaggggaatgacacagttgcagggaaccagggccttaggcagtgccattgaatacaccatagagaatgtctttgaaagtgccccaaacccacgggacctgaaaattgtggtcctgatgctgacgggcgaggtgccggagcagcagctggaggaggcccagagagtcatcctgcaggccaaatgcaagggctacttcttcgtggtcctgggcattggcaggaaggtgaacatcaaggaggtatacaccttcgccagtgagccaaacgacgtcttcttcaaattagtggacaagtccaccgagctcaacgaggagcctttgatgcgcttcgggaggctgttgccatccttcgtcagcagtgaaaatgctttttacttgtccccagatatcaggaaacagtgtgattggttccaaggggaccaacccacaaagaaccttgtgaagtttggtcacaaacaagtaaatgttccgaataacgttacttcaagtcctacatccaacccagtgacgacaacgaagccggtgactacgacgaagccggtgaccaccacaacaaagcctgtaaccaccacaacaaagcctgtgactattataaatcagccatctgtgaagccagccgctgcaaagccggcccctgcgaaacctgtggctgccaagcctgtggccacaaagatggccactgttagacccccagtggcggtgaagccagcaacggcagcgaagcctgtagcagcaaagccagcagctgtaagaccccccgctgctgctgctgcaaaaccagtggcgaccaagcctgaggtccctaggccacaggcagccaaaccagctgccaccaagccagccaccactaagcccatggttaagatgtcccgtgaagtccaggtgtttgagataacagagaacagcgccaaactccactgggagagggctgagccccccggtccttatttttatgacctcaccgtcacctcagcccatgatcagtccctggttctgaagcagaacctcacggtcacggaccgcgtcattggaggcctgctcgctgggcagacataccatgtggctgtggtctgctacctgaggtctcaggtcagagccacctaccacggaagtttcagtacaaagaaatctcagcccccacctccacagccagcaaggtcagcttctagttcaaccatcaatctaatggtgagcacagaaccattggctctcactgaaacagatatatgcaagttgccgaaagacgaaggaacttgcagggatttcatattaaaatggtactatgatccaaacaccaaaagctgtgcaagattctggtatggaggttgtggtggaaacgaaaacaaatttggatcacagaaagaatgtgaaaaggtttgcgctcctgtgctcgccaaacccggagtcatcagtgtgatgggaacctaagcgtgggtggccaacatcatatacctcttgaagaagaaggagtcagccatcgccaacttgtctctgtagaagctccgggtgtagattcccttgcactgtatcatttcatgctttgatttacactcgaactcgggagggaacatcctgctgcatgacctatcagtatggtgctaatgtgtctgtggaccctcgctctctgtctccaggcagttctctcgaatactttgaatgttgtgtaacagttagccactgctggtgtttatgtgaacattcctatcaatccaaattccctctggagtttcatgttatgcctgttgcaggcaaatgtaaagtctagaaaataatgcaaatgtcacggctactctatatacttttgcttggttcattttttttcccttttagttaagcatgactttagatgggaagcctgtgtatcgtggagaaacaagagaccaactttttcattccctgcccccaatttcccagactagatttcaagctaattttctttttctgaagcctctaacaaatgatctagttcagaaggaagcaaaatcccttaatctatgtgcaccgttgggaccaatgccttaattaaagaatttaaaaaagttgtaatagagaatatttttggcattcctctaatgttgtgtgttttttttttgtgtgtgctggagggaggggatttaattttaattttaaaatgtttaggaaatttatacaaagaaactttttaataaagtatattgaaagttaaaaaaaaaaaaaaaaaa

SEQ ID NO: 2183 - DNA, 9944 bp, Homo sapiens
cagtttggagctcagtcttccaccaaaggccgttcagttctcctgggctccagcctcctgcaaggactgcaagagttttcctccgcagctctgagtctccacttttttggtggagaaaggctgcaaaaagaaaaagagacgcagtgagtgggaaaagtatgcatcctattcaaacctaattgaatcgaggagcccagggacacacgccttcaggtttgctcaggggttcatatttggtgcttagacaaattcaaaatgaggaaacatcggcacttgcccttagtggccgtcttttgcctctttctctcaggctttcctacaactcatgcccagcagcagcaagcagcacaagactctgctgacattattttccttattgatggatcaaacaacaccggaagtgtcaatttcgcagtcattctcgacttccttgtaaatctccttgagaaactcccaattggaactcagcagatccgagtgggggtggtccagtttagcgatgagcccagaaccatgttctccttggacacctactccaccaaggcccaggttctgggtgcagtgaaagccctcgggtttgctggtggggagttggccaatatcggcctcgcccttgatttcgtggtggagaaccacttcacccgggcagggggcagccgcgtggaggaaggggttccccaggtgctggtcctcataagtgccgggccttctagtgacgagattcgctacggggtggtagcactgaagcaggctagcgtgttctcattcggccttggagcccaggccgcctccagggcagagcttcagcacatagctaccgatgacaacttggtgtttactgtcccggaattccgtagctttggggacctccaggagaaattactgccgtacattgttggcgtggcccaaaggcacattgtcttgaaaccgccaaccattgtcacacaagtcattgaagtcaacaagagagacatagtcttcctggtggatggctcatctgcactgggactggccaacttcaatgccatccgagacttcattgctaaagtcatccagaggctggaaatcggacaggatcttatccaggtggcagtggcccagtatgcagacactgtgaggcctgaattttatttcaatacccatccaacaaaaagggaagtcataaccgctgtgcggaaaatgaagcccctggacggctcggccctgtacacgggctctgctctagactttgttcgtaacaacctattcacgagttcagccggctaccgggctgccgaggggattcctaagcttttggtgctgatcacaggtggtaagtccctagatgaaatcagccagcctgcccaggagctgaagagaagcagcataatggcctttgccattgggaacaagggtgccgatcaggctgagctggaagagatcgctttcgactcctccctggtgttcatcccagctgagttccgagccgccccattgcaaggcatgctgcctggcttgctggcacctctcaggaccctctctggaacccctgaagttcactcaaacaaaagggatatcatctttcttttggatggatcagccaacgttggaaaaaccaatttcccttatgtgcgcgactttgtaatgaacctagttaacagccttgatattggaaatgacaatattcgtgttggtttagtgcaatttagtgacactcctgtaacggagttctctttaaacacataccagaccaagtcagatatccttggtcatctgaggcagctgcagctccagggaggttcgggcctgaacacaggctcagccctaagctatgtctatgccaaccacttcacggaagctggcggcagcaggatccgtgaacacgtgccgcagctcctgcttctgctcacagctgggcagtctgaggactcctatttgcaagctgccaacgccttgacacgcgcgggcatcctgactttttgtgtgggagctagccaggcgaataaggcagagcttgagcagattgcttttaacccaagcctggtgtatctcatggatgatttcagctccctgccagctttgcctcagcagctgattcagcccctaaccacatatgttagtggaggtgtggaggaagtaccactcgctcagccagagagcaagcgagacattctgttcctctttgacggctcagccaatcttgtgggccagttccctgttgtccgtgactttctctacaagattatcgatgagctcaatgtgaagccagaggggacccgaattgcggtggctcagtacagcgatgatgtcaaggtggagtcccgttttgatgagcaccagagtaagcctgagatcctgaatcttgtgaagagaatgaagatcaagacgggcaaagccctcaacctgggctacgcgctggactatgcacagaggtacatttttgtgaagtctgctggcagccggatcgaggatggagtgcttcagttcctggtgctgctggtcgcaggaaggtcatctgaccgtgtggatgggccagcaagtaacctgaagcagagtggggttgtgcctttcatcttccaagccaagaacgcagaccctgctgagttagagcagatcgtgctgtctccagcgtttatcctggctgcagagtcgcttcccaagattggagatcttcatccacagatagtgaatctcttaaaatcagtgcacaacggagcaccagcaccagtttcaggtgaaaaggacgtggtgtttctgcttgatggctctgagggcgtcaggagcggcttccctctgttgaaagagtttgtccagagagtggtggaaagcctggatgtgggccaggaccgggtccgcgtggccgtggtgcagtacagcgaccggaccaggcccgagttctacctgaattcatacatgaacaagcaggacgtcgtcaacgctgtccgccagctgaccctgctgggagggccgacccccaacaccggggccgccctggagtttgtcctgaggaacatcctggtcagctctgcgggaagcaggataacagaaggtgtgccccagctgctgatcgtcctcacggccgacaggtctggggatgatgtgcggaacccctccgtggtcgtgaagaggggtggggctgtgcccattggcattggcatcgggaacgctgacatcacagagatgcagaccatctccttcatcccggactttgccgtggccattcccacctttcgccagctggggaccgtccaacaggtcatctctgagagggtgacccagctcacccgcgaggagctgagcaggctgcagccggtgttgcagcctctaccgagcccaggtgttggtggcaagagggacgtggtctttctcatcgatgggtcccaaagtgccgggcctgagttccagtacgttcgcaccctcatagagaggctggttgactacctggacgtgggctttgacaccacccgggtggctgtcatccagttcagcgatgaccccaaggtggagttcctgctgaacgcccattccagcaaggatgaagtgcagaacgcggtgcagcggctgaggcccaagggagggcggcagatcaacgtgggcaatgccctggagtacgtgtccaggaacatcttcaagaggcccctggggagccgcattgaagagggcgtcccgcagttcctggtcctcatctcgtctggaaagtctgacgatgaggtggacgacccggcggtggagctcaagcagtttggcgtggcccctttcacgatcgccaggaacgcagaccaggaggagctggtgaagatctcgctgagccccgaatatgtgttctcggtgagcaccttccgggagctgcccagcctggagcagaaactgctgacgcccatcacgaccctgacctcagagcagatccagaagctcttagccagcactcgctatccacctccagcagttgagagtgatgctgcagacattgtctttctgatcgacagctctgagggagttaggccagatggctttgcacatattcgagattttgttagcaggattgttcgaagactcaacatcggccccagtaaagtgagagttggggtcgtgcagttcagcaatgatgtcttcccagaattctatctgaaaacctacagatcccaggccccggtgctggacgccatacggcgcctgaggctcagaggggggtccccactgaacactggcaaggctctcgaatttgtggcaagaaacctctttgttaagtctgcggggagtcgcatagaagacggggtgccccaacacctggtcctggtcctgggtggaaaatcccaggacgatgtgtccaggttcgcccaggtgatccgttcctcgggcattgtgagtttaggggtaggagaccggaacatcgacagaacagagctgcagaccatcaccaatgaccccagactggtcttcacagtgcgagagttcagagagcttcccaacatagaagaaagaatcatgaactcgtttggaccctccgcagccactcctgcacctccaggggtggacacccctcctccttcacggccagagaagaagaaagcagacattgtgttcctgttggatggttccatcaacttcaggagggacagtttccaggaagtgcttcgttttgtgtctgaaatagtggacacagtttatgaagatggcgactccatccaagtggggcttgtccagtacaactctgaccccactgacgaattcttcctgaaggacttctctaccaagaggcagattattgacgccatcaacaaagtggtctacaaagggggaagacacgccaacactaaggtgggccttgagcacctgcgggtaaaccactttgtgcctgaggcaggcagccgcctggaccagcgggtccctcagattgcctttgtgatcacgggaggaaagtcggtggaagatgcacaggatgtgagcctggccctcacccagaggggggtcaaagtgtttgctgttggagtgaggaatatcgactcggaggaggttggaaagatagcgtccaacagcgccacagcgttccgcgtgggcaacgtccaggagctgtccgaactgagcgagcaagttttggaaactttgcatgatgcgatgcatgaaaccctttgccctggtgtaactgatgctgccaaagcttgtaatctggatgtgattctggggtttgatggttctagagaccagaatgtttttgtggcccagaagggcttcgagtccaaggtggacgccatcttgaacagaatcagccagatgcacagggtcagctgcagcggtggccgctcgcccaccgtgcgtgtgtcagtggtggccaacacgccctcgggcccggtggaggcctttgactttgacgagtaccagccagagatgctcgagaagttccggaacatgcgcagccagcacccctacgtcctcacggaggacaccctgaaggtctacctgaacaagttcagacagtcctcgccggacagcgtgaaggtggtcattcattttactgatggagcagacggagatctggctgatttacacagagcatctgagaacctccgccaagaaggagtccgtgccttgatcctggtgggccttgaacgagtggtcaacttggagcggctaatgcatctggagtttgggcgagggtttatgtatgacaggcccctgaggcttaacttgctggacttggattatgaactagcggagcagcttgacaacattgccgagaaagcttgctgtggggttccctgcaagtgctctgggcagaggggagaccgcgggcccatcggcagcatcgggccaaagggtattcctggagaagacggctaccgaggctatcctggtgatgagggtggacccggtgagcgtggtccgcctggtgtgaacggcactcaaggtttccagggctgcccgggccagagaggagtaaagggctctcggggattcccaggagagaagggcgaagtaggagaaattggactggatggtctggatggtgaagatggagacaaaggattgcctggttcttctggagagaaagggaatcctggaagaaggggtgataaaggacctcgaggagagaaaggagaaagaggagatgttgggattcgaggggacccgggtaacccaggacaagacagccaggagagaggacccaaaggagaaaccggtgacctcggccccatgggtgtcccagggagagatggagtacctggaggacctggagaaactgggaagaatggtggctttggccgaaggggaccccccggagctaagggcaacaagggcggtcctggccagccgggctttgagggagagcaggggaccagaggtgcacagggcccagctggtcctgctggtcctccagggctgataggagaacaaggcatttctggacctcggggaagcggaggtgccgctggtgctcctggagaacgaggcagaaccggtccactgggaagaaagggtgagcccggagagccaggaccaaaaggaggaatcgggaaccggggccctcgtggggagacgggagatgacgggagagacggagttggcagtgaaggacgcagaggcaaaaaaggagaaagaggattccctggatacccaggaccaaagggtaacccaggtgaacctgggctaaatggaacaacaggacccaaaggcatcagaggccgaaggggaaattcgggacctccagggatagttggacagaagggagaccctggctacccaggaccagctggtcccaagggcaacaggggcgactccatcgatcaatgtgccctcatccaaagcatcaaagataaatgcccttgctgttacgggcccctggagtgccccgtcttcccaacagaactagcctttgctttagacacctctgagggagtcaaccaagacactttcggccggatgcgagatgtggtcttgagtattgtgaatgacctgaccattgctgagagcaactgcccacggggggcccgggtggctgtggtcacctacaacaacgaggtgaccacggagatccggtttgctgactccaagaggaagtcggtcctcctggacaagattaagaaccttcaggtggctctgacatccaaacagcagagtctggagactgccatgtcgtttgtggccaggaacacatttaagcgtgtgaggaacggattcctaatgaggaaagtggctgttttcttcagcaacacacccacaagagcatccccacagctcagagaggctgtgctcaagctctcagatgcggggatcacccccttgttccttacaaggcaggaagaccggcagctcatcaacgctttgcagatcaataacacagcagtggggcatgcgcttgtcctgcctgcagggagagacctcacagacttcctggagaatgtcctcacgtgtcatgtttgcttggacatctgcaacatcgacccatcctgtggatttggcagttggaggccttccttcagggacaggagagcggcagggagcgatgtggacatcgacatggctttcatcttagacagcgctgagaccaccaccctgttccagttcaatgagatgaagaagtacatagcgtacctggtcagacaactggacatgagcccagatcccaaggcctcccagcacttcgccagagtggcagttgtgcagcacgcgccctctgagtccgtggacaatgccagcatgccacctgtgaaggtggaattctccctgactgactatggctccaaggagaagctggtggacttcctcagcaggggaatgacacagttgcagggaaccagggccttaggcagtgccattgaatacaccatagagaatgtctttgaaagtgccccaaacccacgggacctgaaaattgtggtcctgatgctgacgggcgaggtgccggagcagcagctggaggaggcccagagagtcatcctgcaggccaaatgcaagggctacttcttcgtggtcctgggcattggcaggaaggtgaacatcaaggaggtatacaccttcgccagtgagccaaacgacgtcttcttcaaattagtggacaagtccaccgagctcaacgaggagcctttgatgcgcttcgggaggctgttgccatccttcgtcagcagtgaaaatgctttttacttgtccccagatatcaggaaacagtgtgattggttccaaggggaccaacccacaaagaaccttgtgaagtttggtcacaaacaagtaaatgttccgaataacgttacttcaagtcctacatccaacccagtgacgacaacgaagccggtgactacgacgaagccggtgaccaccacaacaaagcctgtaaccaccacaacaaagcctgtgactattataaatcagccatctgtgaagccagccgctgcaaagccggcccctgcgaaacctgtggctgccaagcctgtggccacaaagatggccactgttagacccccagtggcggtgaagccagcaacggcagcgaagcctgtagcagcaaagccagcagctgtaagaccccccgctgctgctgctgcaaaaccagtggcgaccaagcctgaggtccctaggccacaggcagccaaaccagctgccaccaagccagccaccactaagcccatggttaagatgtcccgtgaagtccaggtgtttgagataacagagaacagcgccaaactccactgggagagggctgagccccccggtccttatttttatgacctcaccgtcacctcagcccatgatcagtccctggttctgaagcagaacctcacggtcacggaccgcgtcattggaggcctgctcgctgggcagacataccatgtggctgtggtctgctacctgaggtctcaggtcagagccacctaccacggaagtttcagtacaaagaaatctcagcccccacctccacagccagcaaggtcagcttctagttcaaccatcaatctaatggtgagcacagaaccattggctctcactgaaacagatatatgcaagttgccgaaagacgaaggaacttgcagggatttcatattaaaatggtactatgatccaaacaccaaaagctgtgcaagattctggtatggaggttgtggtggaaacgaaaacaaatttggatcacagaaagaatgtgaaaaggtttgcgctcctgtgctcgccaaacccggagtcatcagtgtgatgggaacctaagcgtgggtggccaacatcatatacctcttgaagaagaaggagtcagccatcgccaacttgtctctgtagaagctccgggtgtagattcccttgcactgtatcatttcatgctttgatttacactcgaactcgggagggaacatcctgctgcatgacctatcagtatggtgctaatgtgtctgtggaccctcgctctctgtctccaggcagttctctcgaatactttgaatgttgtgtaacagttagccactgctggtgtttatgtgaacattcctatcaatccaaattccctctggagtttcatgttatgcctgttgcaggcaaatgtaaagtctagaaaataatgcaaatgtcacggctactctatatacttttgcttggttcattttttttcccttttagttaagcatgactttagatgggaagcctgtgtatcgtggagaaacaagagaccaactttttcattccctgcccccaatttcccagactagatttcaagctaattttctttttctgaagcctctaacaaatgatctagttcagaaggaagcaaaatcccttaatctatgtgcaccgttgggaccaatgccttaattaaagaatttaaaaaagttgtaatagagaatatttttggcattcctctaatgttgtgtgttttttttttgtgtgtgctggagggaggggatttaattttaattttaaaatgtttaggaaatttatacaaagaaactttttaataaagtatattgaaagttaaaaaaaaaaaaaaaaaa

SEQ ID NO: 2184 - DNA, 10061 bp, Homo sapiens
cagtttggagctcagtcttccaccaaaggccgttcagttctcctgggctccagcctcctgcaaggactgcaagagttttcctccgcagctctgagtctccacttttttggtggagaaaggctgcaaaaagaaaaagagacgcagtgagtgggaaaagtatgcatcctattcaaacctaattgaatcgaggagcccagggacacacgccttcaggtttgctcaggggttcatatttggtgcttagacaaattcaaaatgaggaaacatcggcacttgcccttagtggccgtcttttgcctctttctctcaggctttcctacaactcatgcccagcagcagcaagcagatgtcaaaaatggtgcggctgctgatataatatttctagtggattcctcttggaccattggagaggaacatttccaacttgttcgagagtttctatatgatgttgtaaaatccttagctgtgggagaaaatgatttccattttgctctggtccagttcaacggaaacccacataccgagttcctgttaaatacgtatcgtactaaacaagaagtcctttctcatatttccaacatgtcttatattgggggaaccaatcagactggaaaaggattagaatacataatgcaaagccacctcaccaaggctgctggaagccgggccggtgacggagtccctcaggttatcgtagtgttaactgatggacactcgaaggatggccttgctctgccctcagcggaacttaagtctgctgatgttaacgtgtttgcaattggagttgaggatgcagatgaaggagcgttaaaagaaatagcaagtgaaccgctcaatatgcatatgttcaacctagagaattttacctcacttcatgacatagtaggaaacttagtgtcctgtgtgcattcatccgtgagtccagaaagggctggggacacggaaacccttaaagacatcacagcacaagactctgctgacattattttccttattgatggatcaaacaacaccggaagtgtcaatttcgcagtcattctcgacttccttgtaaatctccttgagaaactcccaattggaactcagcagatccgagtgggggtggtccagtttagcgatgagcccagaaccatgttctccttggacacctactccaccaaggcccaggttctgggtgcagtgaaagccctcgggtttgctggtggggagttggccaatatcggcctcgcccttgatttcgtggtggagaaccacttcacccgggcagggggcagccgcgtggaggaaggggttccccaggtgctggtcctcataagtgccgggccttctagtgacgagattcgctacggggtggtagcactgaagcaggctagcgtgttctcattcggccttggagcccaggccgcctccagggcagagcttcagcacatagctaccgatgacaacttggtgtttactgtcccggaattccgtagctttggggacctccaggagaaattactgccgtacattgttggcgtggcccaaaggcacattgtcttgaaaccgccaaccattgtcacacaagtcattgaagtcaacaagagagacatagtcttcctggtggatggctcatctgcactgggactggccaacttcaatgccatccgagacttcattgctaaagtcatccagaggctggaaatcggacaggatcttatccaggtggcagtggcccagtatgcagacactgtgaggcctgaattttatttcaatacccatccaacaaaaagggaagtcataaccgctgtgcggaaaatgaagcccctggacggctcggccctgtacacgggctctgctctagactttgttcgtaacaacctattcacgagttcagccggctaccgggctgccgaggggattcctaagcttttggtgctgatcacaggtggtaagtccctagatgaaatcagccagcctgcccaggagctgaagagaagcagcataatggcctttgccattgggaacaagggtgccgatcaggctgagctggaagagatcgctttcgactcctccctggtgttcatcccagctgagttccgagccgccccattgcaaggcatgctgcctggcttgctggcacctctcaggaccctctctggaacccctgaagttcactcaaacaaaagggatatcatctttcttttggatggatcagccaacgttggaaaaaccaatttcccttatgtgcgcgactttgtaatgaacctagttaacagccttgatattggaaatgacaatattcgtgttggtttagtgcaatttagtgacactcctgtaacggagttctctttaaacacataccagaccaagtcagatatccttggtcatctgaggcagctgcagctccagggaggttcgggcctgaacacaggctcagccctaagctatgtctatgccaaccacttcacggaagctggcggcagcaggatccgtgaacacgtgccgcagctcctgcttctgctcacagctgggcagtctgaggactcctatttgcaagctgccaacgccttgacacgcgcgggcatcctgactttttgtgtgggagctagccaggcgaataaggcagagcttgagcagattgcttttaacccaagcctggtgtatctcatggatgatttcagctccctgccagctttgcctcagcagctgattcagcccctaaccacatatgttagtggaggtgtggaggaagtaccactcgctcagccagagagcaagcgagacattctgttcctctttgacggctcagccaatcttgtgggccagttccctgttgtccgtgactttctctacaagattatcgatgagctcaatgtgaagccagaggggacccgaattgcggtggctcagtacagcgatgatgtcaaggtggagtcccgttttgatgagcaccagagtaagcctgagatcctgaatcttgtgaagagaatgaagatcaagacgggcaaagccctcaacctgggctacgcgctggactatgcacagaggtacatttttgtgaagtctgctggcagccggatcgaggatggagtgcttcagttcctggtgctgctggtcgcaggaaggtcatctgaccgtgtggatgggccagcaagtaacctgaagcagagtggggttgtgcctttcatcttccaagccaagaacgcagaccctgctgagttagagcagatcgtgctgtctccagcgtttatcctggctgcagagtcgcttcccaagattggagatcttcatccacagatagtgaatctcttaaaatcagtgcacaacggagcaccagcaccagtttcaggtgaaaaggacgtggtgtttctgcttgatggctctgagggcgtcaggagcggcttccctctgttgaaagagtttgtccagagagtggtggaaagcctggatgtgggccaggaccgggtccgcgtggccgtggtgcagtacagcgaccggaccaggcccgagttctacctgaattcatacatgaacaagcaggacgtcgtcaacgctgtccgccagctgaccctgctgggagggccgacccccaacaccggggccgccctggagtttgtcctgaggaacatcctggtcagctctgcgggaagcaggataacagaaggtgtgccccagctgctgatcgtcctcacggccgacaggtctggggatgatgtgcggaacccctccgtggtcgtgaagaggggtggggctgtgcccattggcattggcatcgggaacgctgacatcacagagatgcagaccatctccttcatcccggactttgccgtggccattcccacctttcgccagctggggaccgtccaacaggtcatctctgagagggtgacccagctcacccgcgaggagctgagcaggctgcagccggtgttgcagcctctaccgagcccaggtgttggtggcaagagggacgtggtctttctcatcgatgggtcccaaagtgccgggcctgagttccagtacgttcgcaccctcatagagaggctggttgactacctggacgtgggctttgacaccacccgggtggctgtcatccagttcagcgatgaccccaaggtggagttcctgctgaacgcccattccagcaaggatgaagtgcagaacgcggtgcagcggctgaggcccaagggagggcggcagatcaacgtgggcaatgccctggagtacgtgtccaggaacatcttcaagaggcccctggggagccgcattgaagagggcgtcccgcagttcctggtcctcatctcgtctggaaagtctgacgatgaggtggacgacccggcggtggagctcaagcagtttggcgtggcccctttcacgatcgccaggaacgcagaccaggaggagctggtgaagatctcgctgagccccgaatatgtgttctcggtgagcaccttccgggagctgcccagcctggagcagaaactgctgacgcccatcacgaccctgacctcagagcagatccagaagctcttagccagcactcgctatccacctccagtgcgagagttcagagagcttcccaacatagaagaaagaatcatgaactcgtttggaccctccgcagccactcctgcacctccaggggtggacacccctcctccttcacggccagagaagaagaaagcagacattgtgttcctgttggatggttccatcaacttcaggagggacagtttccaggaagtgcttcgttttgtgtctgaaatagtggacacagtttatgaagatggcgactccatccaagtggggcttgtccagtacaactctgaccccactgacgaattcttcctgaaggacttctctaccaagaggcagattattgacgccatcaacaaagtggtctacaaagggggaagacacgccaacactaaggtgggccttgagcacctgcgggtaaaccactttgtgcctgaggcaggcagccgcctggaccagcgggtccctcagattgcctttgtgatcacgggaggaaagtcggtggaagatgcacaggatgtgagcctggccctcacccagaggggggtcaaagtgtttgctgttggagtgaggaatatcgactcggaggaggttggaaagatagcgtccaacagcgccacagcgttccgcgtgggcaacgtccaggagctgtccgaactgagcgagcaagttttggaaactttgcatgatgcgatgcatgaaaccctttgccctggtgtaactgatgctgccaaagcttgtaatctggatgtgattctggggtttgatggttctagagaccagaatgtttttgtggcccagaagggcttcgagtccaaggtggacgccatcttgaacagaatcagccagatgcacagggtcagctgcagcggtggccgctcgcccaccgtgcgtgtgtcagtggtggccaacacgccctcgggcccggtggaggcctttgactttgacgagtaccagccagagatgctcgagaagttccggaacatgcgcagccagcacccctacgtcctcacggaggacaccctgaaggtctacctgaacaagttcagacagtcctcgccggacagcgtgaaggtggtcattcattttactgatggagcagacggagatctggctgatttacacagagcatctgagaacctccgccaagaaggagtccgtgccttgatcctggtgggccttgaacgagtggtcaacttggagcggctaatgcatctggagtttgggcgagggtttatgtatgacaggcccctgaggcttaacttgctggacttggattatgaactagcggagcagcttgacaacattgccgagaaagcttgctgtggggttccctgcaagtgctctgggcagaggggagaccgcgggcccatcggcagcatcgggccaaagggtattcctggagaagacggctaccgaggctatcctggtgatgagggtggacccggtgagcgtggtccgcctggtgtgaacggcactcaaggtttccagggctgcccgggccagagaggagtaaagggctctcggggattcccaggagagaagggcgaagtaggagaaattggactggatggtctggatggtgaagatggagacaaaggattgcctggttcttctggagagaaagggaatcctggaagaaggggtgataaaggacctcgaggagagaaaggagaaagaggagatgttgggattcgaggggacccgggtaacccaggacaagacagccaggagagaggacccaaaggagaaaccggtgacctcggccccatgggtgtcccagggagagatggagtacctggaggacctggagaaactgggaagaatggtggctttggccgaaggggaccccccggagctaagggcaacaagggcggtcctggccagccgggctttgagggagagcaggggaccagaggtgcacagggcccagctggtcctgctggtcctccagggctgataggagaacaaggcatttctggacctcggggaagcggaggtgccgctggtgctcctggagaacgaggcagaaccggtccactgggaagaaagggtgagcccggagagccaggaccaaaaggaggaatcgggaaccggggccctcgtggggagacgggagatgacgggagagacggagttggcagtgaaggacgcagaggcaaaaaaggagaaagaggattccctggatacccaggaccaaagggtaacccaggtgaacctgggctaaatggaacaacaggacccaaaggcatcagaggccgaaggggaaattcgggacctccagggatagttggacagaagggagaccctggctacccaggaccagctggtcccaagggcaacaggggcgactccatcgatcaatgtgccctcatccaaagcatcaaagataaatgcccttgctgttacgggcccctggagtgccccgtcttcccaacagaactagcctttgctttagacacctctgagggagtcaaccaagacactttcggccggatgcgagatgtggtcttgagtattgtgaatgacctgaccattgctgagagcaactgcccacggggggcccgggtggctgtggtcacctacaacaacgaggtgaccacggagatccggtttgctgactccaagaggaagtcggtcctcctggacaagattaagaaccttcaggtggctctgacatccaaacagcagagtctggagactgccatgtcgtttgtggccaggaacacatttaagcgtgtgaggaacggattcctaatgaggaaagtggctgttttcttcagcaacacacccacaagagcatccccacagctcagagaggctgtgctcaagctctcagatgcggggatcacccccttgttccttacaaggcaggaagaccggcagctcatcaacgctttgcagatcaataacacagcagtggggcatgcgcttgtcctgcctgcagggagagacctcacagacttcctggagaatgtcctcacgtgtcatgtttgcttggacatctgcaacatcgacccatcctgtggatttggcagttggaggccttccttcagggacaggagagcggcagggagcgatgtggacatcgacatggctttcatcttagacagcgctgagaccaccaccctgttccagttcaatgagatgaagaagtacatagcgtacctggtcagacaactggacatgagcccagatcccaaggcctcccagcacttcgccagagtggcagttgtgcagcacgcgccctctgagtccgtggacaatgccagcatgccacctgtgaaggtggaattctccctgactgactatggctccaaggagaagctggtggacttcctcagcaggggaatgacacagttgcagggaaccagggccttaggcagtgccattgaatacaccatagagaatgtctttgaaagtgccccaaacccacgggacctgaaaattgtggtcctgatgctgacgggcgaggtgccggagcagcagctggaggaggcccagagagtcatcctgcaggccaaatgcaagggctacttcttcgtggtcctgggcattggcaggaaggtgaacatcaaggaggtatacaccttcgccagtgagccaaacgacgtcttcttcaaattagtggacaagtccaccgagctcaacgaggagcctttgatgcgcttcgggaggctgttgccatccttcgtcagcagtgaaaatgctttttacttgtccccagatatcaggaaacagtgtgattggttccaaggggaccaacccacaaagaaccttgtgaagtttggtcacaaacaagtaaatgttccgaataacgttacttcaagtcctacatccaacccagtgacgacaacgaagccggtgactacgacgaagccggtgaccaccacaacaaagcctgtaaccaccacaacaaagcctgtgactattataaatcagccatctgtgaagccagccgctgcaaagccggcccctgcgaaacctgtggctgccaagcctgtggccacaaagatggccactgttagacccccagtggcggtgaagccagcaacggcagcgaagcctgtagcagcaaagccagcagctgtaagaccccccgctgctgctgctgcaaaaccagtggcgaccaagcctgaggtccctaggccacaggcagccaaaccagctgccaccaagccagccaccactaagcccatggttaagatgtcccgtgaagtccaggtgtttgagataacagagaacagcgccaaactccactgggagagggctgagccccccggtccttatttttatgacctcaccgtcacctcagcccatgatcagtccctggttctgaagcagaacctcacggtcacggaccgcgtcattggaggcctgctcgctgggcagacataccatgtggctgtggtctgctacctgaggtctcaggtcagagccacctaccacggaagtttcagtacaaagaaatctcagcccccacctccacagccagcaaggtcagcttctagttcaaccatcaatctaatggtgagcacagaaccattggctctcactgaaacagatatatgcaagttgccgaaagacgaaggaacttgcagggatttcatattaaaatggtactatgatccaaacaccaaaagctgtgcaagattctggtatggaggttgtggtggaaacgaaaacaaatttggatcacagaaagaatgtgaaaaggtttgcgctcctgtgctcgccaaacccggagtcatcagtgtgatgggaacctaagcgtgggtggccaacatcatatacctcttgaagaagaaggagtcagccatcgccaacttgtctctgtagaagctccgggtgtagattcccttgcactgtatcatttcatgctttgatttacactcgaactcgggagggaacatcctgctgcatgacctatcagtatggtgctaatgtgtctgtggaccctcgctctctgtctccaggcagttctctcgaatactttgaatgttgtgtaacagttagccactgctggtgtttatgtgaacattcctatcaatccaaattccctctggagtttcatgttatgcctgttgcaggcaaatgtaaagtctagaaaataatgcaaatgtcacggctactctatatacttttgcttggttcattttttttcccttttagttaagcatgactttagatgggaagcctgtgtatcgtggagaaacaagagaccaactttttcattccctgcccccaatttcccagactagatttcaagctaattttctttttctgaagcctctaacaaatgatctagttcagaaggaagcaaaatcccttaatctatgtgcaccgttgggaccaatgccttaattaaagaatttaaaaaagttgtaatagagaatatttttggcattcctctaatgttgtgtgttttttttttgtgtgtgctggagggaggggatttaattttaattttaaaatgtttaggaaatttatacaaagaaactttttaataaagtatattgaaagttaaaaaaaaaaaaaaaaaa

SEQ ID NO: 2185 - DNA, 6936 bp, Homo sapiens; identical to SEQ ID NO: 1676

SEQ ID NO: 2186 - DNA, 1376 bp, Homo sapiens
cagtgcctgaaatccagcctgctgcttactcacatcctcatactcagctgcagactgcctgacagaagggctgccaaactgcactccagacagacaggtgcacagccaggcctgattcagcaggaagcatctcagacaccaaccactatgctgtcagcagttgcccggggctaccagggctggtttcatccctgtgctaggctttctgtgaggatgagcagcaccgggatagacaggaagggcgtcctggctaaccgggtagccgtggtcacggggtccaccagtgggatcggctttgccatcgcccgacgtctggcccgggacggggcccacgtggtcatcagcagccggaagcagcagaacgtggaccgggccatggccaagctgcagggggaggggctgagtgtggcgggcattgtgtgccacgtggggaaggctgaggaccgggagcagctggtggccaaggccctggagcactgtgggggcgtcgacttcctggtgtgcagcgcaggggtcaaccctctggtagggagcactctggggaccagtgagcagatctgggacaagatcctaagtgtgaacgtgaagtccccagccctgctgctgagccagttgctgccctacatggagaacaggaggggtgctgtcatcctggtctcttccattgcagcttataatccagtagtggcgctgggtgtctacaatgtcagcaagacagcgctgctgggtctcactagaacactggcattggagctggcccccaaggacatccgggtaaactgcgtggttccaggaattatcaaaactgacttcagcaaagtgtttcatgggaatgagtctctctggaagaacttcaaggaacatcatcagctgcagaggattggggagtcagaggactgtgcaggaatcgtgtccttcctgtgctctccagatgccagctacgtcaacggggagaacattgcggtggcaggctactccactcggctctgagaggagtgggggcggctgcgtagctgtggtcccaggcccaggagcctgagggggtgtctaggtgatcatttggatctggaggcagagtctgccattctgccagactagcaatttgggggcttactcatgctaggcttgaggaagaagaaaaacgcttcggcattctccttaggacttatctgcttgtagatttggctgatccaattaacatgtggggttcttggtgtgggtctggggagctgaaggattttatggagctggtgctttggaggaatcttaagggaaaggagtagaagctcaggcctttgaaggatttcagctcctcctctctgtaatttgtgctttaagcattttttttcctaaaataaactcaaatttatcctcaa

SEQ ID NO: 2187 - DNA, 1676 bp, Homo sapiens
agcaacctgctctggttcccttccacgctgtggaagctttgttcttttggtcttcatgataaatcttgctgctgctcactcgttgggtccgtgccacctttaagagctgtaacactcaccgcgaaggtctgcaacttcactcctggggccagcaagaccacgaatgcaccgagaggaatgaacaactctggacacaccatctttaagaaccgtaatactcaccgcaagggtctgcaacttcattcttgaagtcagtgaggccaagaacccatcaattccgtacacattttggtgactttgaagagactgtcacctatcaccaagtggtgagactattgccaagcagtgagactattgccaagtggtgagaccatcaccaagcggtgagactatcacctatcgccaagtggcctgattcagcaggaagcatctcagacaccaaccactatgctgtcagcagttgcccggggctaccagggctggtttcatccctgtgctaggctttctgtgaggatgagcagcaccgggatagacaggaagggcgtcctggctaaccgggtagccgtggtcacggggtccaccagtgggatcggctttgccatcgcccgacgtctggcccgggacggggcccacgtggtcatcagcagccggaagcagcagaacgtggaccgggccatggccaagctgcagggggaggggctgagtgtggcgggcattgtgtgccacgtggggaaggctgaggaccgggagcagctggtggccaaggccctggagcactgtgggggcgtcgacttcctggtgtgcagcgcaggggtcaaccctctggtagggagcactctggggaccagtgagcagatctgggacaagatcctaagtgtgaacgtgaagtccccagccctgctgctgagccagttgctgccctacatggagaacaggaggggtgctgtcatcctggtctcttccattgcagcttataatccagtagtggcgctgggtgtctacaatgtcagcaagacagcgctgctgggtctcactagaacactggcattggagctggcccccaaggacatccgggtaaactgcgtggttccaggaattatcaaaactgacttcagcaaagtgtttcatgggaatgagtctctctggaagaacttcaaggaacatcatcagctgcagaggattggggagtcagaggactgtgcaggaatcgtgtccttcctgtgctctccagatgccagctacgtcaacggggagaacattgcggtggcaggctactccactcggctctgagaggagtgggggcggctgcgtagctgtggtcccaggcccaggagcctgagggggtgtctaggtgatcatttggatctggaggcagagtctgccattctgccagactagcaatttgggggcttactcatgctaggcttgaggaagaagaaaaacgcttcggcattctccttaggacttatctgcttgtagatttggctgatccaattaacatgtggggttcttggtgtgggtctggggagctgaaggattttatggagctggtgctttggaggaatcttaagggaaaggagtagaagctcaggcctttgaaggatttcagctcctcctctctgtaatttgtgctttaagcattttttttcctaaaataaactcaaatttatcctcaa

SEQ ID NO: 2188 - DNA, 2005 bp, Homo sapiens
aggtgccacccagcgggttccagcttgtttgctgcatagattacaacggtgatggcgggcaagcggtccggctggagccgggcggctctcctccagctccttctcggcgtgaacctggtggtgatgccgcccacccgggcccggagtctgcgcttcgttaccttgctgtaccgccatggagaccgttcaccagtgaagacatatcccaaggacccctatcaggaagaagaatggccccaggggtttggtcagttaaccaaggaggggatgctacagcactgggaactgggccaggccctgcggcagcgctatcacggcttcctaaacacctcttatcaccggcaagaggtttatgtgcgaagcacagactttgaccggactctcatgagtgctgaggccaacctggctggactcttccctcccaacgggatgcagcgcttcaacccgaacatctcgtggcagcctattcctgtgcacactgtgcccatcactgaggacaggctgctgaagttcccgttgggcccatgtccccgttatgagcagctgcagaacgagacccggcagacaccagagtatcagaatgagagttctcggaatgcacaatttctggacatggtggccaacgagacagggcttacagacctgacactggagaccgtctggaatgtctatgacacactcttctgtgagcaaacgcacgggctgcgcctgccgccctgggcctcaccccaaaccatgcagcgtctcagccggctaaaggacttcagcttccgcttcctcttcggaatctaccagcaggcggagaaggcccggcttcaggggggagtcctgctggctcagataaggaagaacctgaccctaatggcgaccacctcccagctccccaagctgctggtttactctgcgcacgacactaccctggttgccctgcaaatggcactggatgtctacaatggtgaacaagccccctacgcctcctgccacatatttgaactgtaccaggaagattctgggaatttctcagtggagatgtactttcggaacgagagtgacaaggccccctggccgctcagcctgcctggctgccctcaccgctgcccactgcaggacttccttcgcctcacagagcccgtcgtgcccaaggattggcagcaggagtgccagctggcaagcggtcctgcagacacagaggtgattgtggccttggctgtatgtggctccatcctcttcctcctcatagtgctgctcctcaccgtcctcttccggatgcaggcccagcctcctggctaccgccacgtcgcagatggggaggaccacgcctgacaaccactcagcccccttccctccacctcctaggggaggtgggctgggccctcgctcctgactgttgctgctccccagcccatggacaggagatcctgggttgggcctccctctgatgaccccagccagatgagcgagtggggctcagcgtggcccatggtgcctgtcactcagcattcccatgcctgatgtttaccaagtgctgtgttggacactggctttctccaaacaggatttgcctcctccacgctccctacacacctgagatgtaaactggcagtcagtgttcactcaggacctaggattagaaaatggcagagttggtgctggatccaccttgcacttctatcaagccctgttctttttcctccagcctgaagtcttcggcaaatagctcagagggacacggtcttgcctctcagtgcttattttagtgggaaaaacaccagccagccacatttccctgtgtctggctagagccaccattagactcagacagaatgcttcaggaatcgttgtcaccccttcaactggagcaggacggaaggttgtctgtacttgggagggagtggggagtggtgggaagggagttgcttgtcacacgaatcaggaaactgctctccctcagctgggctggggtctccagggacctgagctacatgcaggttgtgagctggaaaag

SEQ ID NO: 2189 - DNA, 2823 bp, Homo sapiens
gaaatccaacccggtcacctacccgcgcgactgtgtccacggatggcacgaaagccaagcgagtccccctgccgagctactcgcgtccgcctcctcccaagctgagctctgctccgcccacctgagtccttcgccagttaggaggaaacacagccgcttaatgaactgctgcatcgggctgggagagaaagctcgcgggtcccaccgggcctcctacccaagtctcagcgcgcttttcaccgaggcctcaattctgggatttggcagctttgctgtgaaagcccaagtgggtaaccaacagcttggaggacccgagtggattcgattctctctcactcctcggccactcaactgctccttgtccctgactccgcgagggcaaagatgggtcagggtgggatgttacattagtgttgagactctttggatccgtttcgtgggtaccgaggacgcctgggtacgcgggacaggctgcacccgcctgctagaggcgccccatcgaggcgccacgggtcgcgggtcacgcggcggagggggcgtggcctgcccccggcccagccggctcttctttgcctctgctggagtccggggagtggcgttggctgctagagcgatgccgggccggagttgcgtcgccttagtcctcctggctgccgccgtcagctgtgccgtcgcgcagcacgcgccgccgtggacagaggactgcagaaaatcaacctatcctccttcaggaccaacgtacagaggtgcagttccatggtacaccataaatcttgacttaccaccctacaaaagatggcatgaattgatgcttgacaaggcaccaatgctaaaggttatagtgaattctctgaagaatatgataaatacattcgtgccaagtggaaaagttatgcaggtggtggatgaaaaattgcctggcctacttggcaactttcctggcccttttgaagaggaaatgaagggtattgccgctgttactgatatacctttaggagagattatttcattcaatattttttatgaattatttaccatttgtacttcaatagtagcagaagacaaaaaaggtcatctaatacatgggagaaacatggattttggagtatttcttgggtggaacataaataatgatacctgggtcataactgagcaactaaaacctttaacagtgaatttggatttccaaagaaacaacaaaactgtcttcaaggcttcaagctttgctggctatgtgggcatgttaacaggattcaaaccaggactgttcagtcttacactgaatgaacgtttcagtataaatggtggttatctgggtattctagaatggattctgggaaagaaagatgccatgtggatagggttcctcactagaacagttctggaaaatagcacaagttatgaagaagccaagaatttattgaccaagaccaagatattggccccagcctactttatcctgggaggcaaccagtctggggaaggttgtgtgattacacgagacagaaaggaatcattggatgtatatgaactcgatgctaagcagggtagatggtatgtggtacaaacaaattatgaccgttggaaacatcccttcttccttgatgatcgcagaacgcctgcaaagatgtgtctgaaccgcaccagccaagagaatatctcatttgaaaccatgtatgatgtcctgtcaacaaaacctgtcctcaacaagctgaccgtatacacaaccttgatagatgttaccaaaggtcaattcgaaacttacctgcgggactgccctgacccttgtataggttggtgagcacacgtctggcctacagaatgcggcctctgagacatgaagacaccatctccatgtgaccgaacactgcagctgtctgaccttccaaagactaagactcgcggcaggttctctttgagtcaatagcttgtcttcgtccatctgttgacaaatgacagatcttttttttttccccctatcagttgatttttcttatttacagataacttctttaggggaagtaaaacagtcatctagaattcactgagttttgtttcactttgacatttggggatctggtgggcagtcgaaccatggtgaactccacctccgtggaataaatggagattcagcgtgggtgttgaatccagcacgtctgtgtgagtaacgggacagtaaacactccacattcttcagtttttcacttctacctacatatttgtatgtttttctgtataacagccttttccttctggttctaactgctgttaaaattaatatatcattatctttgctgttattgacagcgatataattttattacatatgattagagggatgagacagacattcacctgtatatttcttttaatgggcacaaaatgggcccttgcctctaaatagcactttttggggttcaagaagtaatcagtatgcaaagcaatcttttatacaataattgaagtgttccctttttcataattactctacttcccagtaaccctaaggaagttgctaacttaaaaaactgcatcccacgttctgttaatttaattctcataagtagcattcatgtaataaacaggtttttagtttgttcttcagattgatagggagttttaaagaaattttagtagttactaaaattatgttactgtatttttcagaaatccaactgcttatgaaaagtactaatagaacttgttaacctttctaaccttcacgattaactgtgaaatgtacgtcatttgtgcaagaccgtttgtccacttcattttgtataatcacagttgtgttcctgacactcaataaacagtcattgg

SEQ ID NO: 2190 - DNA, 2823 bp, Homo sapiens; identical to SEQ ID NO: 2189

SEQ ID NO: 2191 - DNA, 2503 bp, Homo sapiens
ggactttgaaatccaacccggtcacctacccgcgcgactgtgtccacggatggcacgaaagccaagcgagtccccctgccgagctactcgcgtccgcctcctcccaagctgagctctgctccgcccacctgagtccttcgccagttaggaggaaacacagccgcttaatgaactgctgcatcgggctgggagagaaagctcgcgggtcccaccgggcctcctacccaagtctcagcgcgcttttcaccgaggcctcaattctgggatttggcagctttgctgtgaaagcccaatggacagaggactgcagaaaatcaacctatcctccttcaggaccaacgtacagaggtgcagttccatggtacaccataaatcttgacttaccaccctacaaaagatggcatgaattgatgcttgacaaggcaccaatgctaaaggttatagtgaattctctgaagaatatgataaatacattcgtgccaagtggaaaagttatgcaggtggtggatgaaaaattgcctggcctacttggcaactttcctggcccttttgaagaggaaatgaagggtattgccgctgttactgatatacctttaggagagattatttcattcaatattttttatgaattatttaccatttgtacttcaatagtagcagaagacaaaaaaggtcatctaatacatgggagaaacatggattttggagtatttcttgggtggaacataaataatgatacctgggtcataactgagcaactaaaacctttaacagtgaatttggatttccaaagaaacaacaaaactgtcttcaaggcttcaagctttgctggctatgtgggcatgttaacaggattcaaaccaggactgttcagtcttacactgaatgaacgtttcagtataaatggtggttatctgggtattctagaatggattctgggaaagaaagatgccatgtggatagggttcctcactagaacagttctggaaaatagcacaagttatgaagaagccaagaatttattgaccaagaccaagatattggccccagcctactttatcctgggaggcaaccagtctggggaaggttgtgtgattacacgagacagaaaggaatcattggatgtatatgaactcgatgctaagcagggtagatggtatgtggtacaaacaaattatgaccgttggaaacatcccttcttccttgatgatcgcagaacgcctgcaaagatgtgtctgaaccgcaccagccaagagaatatctcatttgaaaccatgtatgatgtcctgtcaacaaaacctgtcctcaacaagctgaccgtatacacaaccttgatagatgttaccaaaggtcaattcgaaacttacctgcgggactgccctgacccttgtataggttggtgagcacacgtctggcctacagaatgcggcctctgagacatgaagacaccatctccatgtgaccgaacactgcagctgtctgaccttccaaagactaagactcgcggcaggttctctttgagtcaaaagcttgtcttcgtccatctgttgacaaatgacagacctttttttttcccccatcagttgatttttcttatttacagataacttctttaggggaagtaaaacagtcatctagaattcactgagttttgtttcactttgacatttggggatctggtgggcagtcgaaccatggtgaactccacctccgtggaataaatggagattcagcgtgggtgttgaatccagcacgtctgtgtgagtaacgggacagtaaacactccacattcttcagtttttcacttctacctacatatttgtatgtttttctgtataacagccttttccttctggttctaactgctgttaaaattaatatatcattatctttgctgttattgacagcgatataattttattacatatgattagagggatgagacagacattcacctgtatatttcttttaatgggcacaaaatgggcccttgcctctaaatagcactttttggggttcaagaagtaatcagtatgcaaagcaatcttttatacaataattgaagtgttccctttttcataattactgtacttcccagtaaccctaaggaagttgctaacttaaaaaactgcatcccacgttctgttaatttagtaaataaacaagtcaaagacttgtggaaaataggaagtgaacccatattttaaattctcataagtagcattcatgtaataaacaggtttttagtttgttcttcagattgatagggagttttaaagaaattttagtagttactaaaattatgttactgtatttttcagaaatcaaactgcttatgaaaagtactaatagaacttgttaacctttctaaccttcacgattaactgtgaaatgtacgtcatttgtgcaagaccgtttgtccacttcattttgtataatcacagttgtgttcctgacactcaataaacagtcattggaaagagtgccagtcagcagtcatgca

SEQ ID NO: 2192 - DNA, 2328 bp, Homo sapiens
ctggagtccggggagtggcgttggctgctagagcgatgccgggccggagttgcgtcgccttagtcctcctggctgccgccgtcagctgtgccgtcgcgcagcacgcgccgccgtggacagaggactgcagaaaatcaacctatcctccttcaggaccaacgtacagaggtgcagttccatggtacaccataaatcttgacttaccaccctacaaaagatggcatgaattgatgcttgacaaggcaccaatgctaaaggttatagtgaattctctgaagaatatgataaatacattcgtgccaagtggaaaagttatgcaggtggtggatgaaaaattgcctggcctacttggcaactttcctggcccttttgaagaggaaatgaagggtattgccgctgttactgatatacctttaggagagattatttcattcaatattttttatgaattatttaccatttgtacttcaatagtagcagaagacaaaaaaggtcatctaatacatgggagaaacatggattttggagtatttcttgggtggaacataaataatgatacctgggtcataactgagcaactaaaacctttaacagtgaatttggatttccaaagaaacaacaaaactgtcttcaaggcttcaagctttgctggctatgtgggcatgttaacaggattcaaaccaggactgttcagtcttacactgaatgaacgtttcagtataaatggtggttatctgggtattctagaatggattctgggaaagaaagatgccatgtggatagggttcctcactagaacagttctggaaaatagcacaagttatgaagaagccaagaatttattgaccaagaccaagatattggccccagcctactttatcctgggaggcaaccagtctggggaaggttgtgtgattacacgagacagaaaggaatcattggatgtatatgaactcgatgctaagcagggtagatggtatgtggtacaaacaaattatgaccgttggaaacatcccttcttccttgatgatcgcagaacgcctgcaaagatgtgtctgaaccgcaccagccaagagaatatctcatttgaaaccatgtatgatgtcctgtcaacaaaacctgtcctcaacaagctgaccgtatacacaaccttgatagatgttaccaaaggtcaattcgaaacttacctgcgggactgccctgacccttgtataggttggtgagcacacgtctggcctacagaatgcggcctctgagacatgaagacaccatctccatgtgaccgaacactgcagctgtctgaccttccaaagactaagactcgcggcaggttctctttgagtcaatagcttgtcttcgtccatctgttgacaaatgacagatctttttttttccccctatcagttgatttttcttatttacagataacttctttaggggaagtaaaacagtcatctagaattcactgagttttgtttcactttgacatttggggatctggtgggcagtcgaaccatggtgaactccacctccgtggaataaatggagattcagcgtgggtgttgaatccagcacgtctgtgtgagtaacgggacagtaaacactccacattcttcagtttttcacttctacctacatatttgtatgtttttctgtataacagccttttccttctggttctaactgctgttaaaattaatatatcattatctttgctgttattgacagcgatataattttattacatatgattagagggatgagacagacattcacctgtatatttcttttaatgggcacaaaatgggcccttgcctctaaatagcactttttggggttcaagaagtaatcagtatgcaaagcaatcttttatacaataattgaagtgttccctttttcataattactctacttcccagtaaccctaaggaagttgctaacttaaaaaactgcatcccacgttctgttaatttagtaaataaacaagtcaaagacttgtggaaaataggaagtgaacccatattttaaattctcataagtagcattcatgtaataaacaggtttttagtttgttcttcagattgatagggagttttaaagaaattttagtagttactaaaattatgttactgtatttttcagaaatccaactgcttatgaaaagtactaatagaacttgttaacctttctaaccttcacgattaactgtgaaatgtacgtcatttgtgcaagaccgtttgtccacttcattttgtataatcacagttgtgttcctgacactcaataaacagtcattggaaaaaaaaaaaaaaaaaaaaaaaaaaaaaa

SEQ ID NO: 2193 - DNA, 2390 bp, Homo sapiens
tgcaacccagagggcaggatttcctgctggactttgaaatccaacccggtcacctacccgcgcgactgtgtccacggatggcacgaaagccaagcgagtccccctgccgagctactcgcgtccgcctcctcccaagctgagctctgctccgcccacctgagtccttcgccagttaggaggaaacacagccgcttaatgaactgctgcatcgggctgggagagaaagctcgcgggtcccaccgggcctcctacccaagtctcagcgcgcttttcaccgaggcctcaattctgggatttggcagctttgctgtgaaagcccaatggacagaggactgcagaaaatcaacctatcctccttcaggaccaacgtatttcccgtcagtgataatcaggtacagaggtgcagttccatggtacaccataaatcttgacttaccaccctacaaaagatggcatgaattgatgcttgacaaggcaccaatgcctggcctacttggcaactttcctggcccttttgaagaggaaatgaagggtattgccgctgttactgatatacctttaggagagattatttcattcaatattttttatgaattatttaccatttgtacttcaatagtagcagaagacaaaaaaggtcatctaatacatgggagaaacatggattttggagtatttcttgggtggaacataaataatgatacctgggtcataactgagcaactaaaacctttaacagtgaatttggatttccaaagaaacaacaaaactgtcttcaaggcttcaagctttgctggctatgtgggcatgttaacaggattcaaaccaggactgttcagtcttacactgaatgaacgtttcagtataaatggtggttatctgggtattctagaatggattctgggaaagaaagatgccatgtggatagggttcctcactagaacagttctggaaaatagcacaagttatgaagaagccaagaatttattgaccaagaccaagatattggccccagcctactttatcctgggaggcaaccagtctggggaaggttgtgtgattacacgagacagaaaggaatcattggatgtatatgaactcgatgctaagcagggtagatggtatgtggtacaaacaaattatgaccgttggaaacatcccttcttccttgatgatcgcagaacgcctgcaaagatgtgtctgaaccgcaccagccaagagaatatctcatttgaaaccatgtatgatgtcctgtcaacaaaacctgtcctcaacaagctgaccgtatacacaaccttgatagatgttaccaaaggtcaattcgaaacttacctgcgggactgccctgacccttgtataggttggtgagcacacgtctggcctacagaatgcggcctctgagacatgaagacaccatctccatgtgaccgaacactgcagctgtctgaccttccaaagactaagactcgcggcaggttctctttgagtcaatagcttgtcttcgtccatctgttgacaaatgacagatcttttttttttccccctatcagttgatttttcttatttacagataacttctttaggggaagtaaaacagtcatctagaattcactgagttttgtttcactttgacatttggggatctggtgggcagtcgaaccatggtgaactccacctccgtggaataaatggagattcagcgtgggtgttgaatccagcacgtctgtgtgagtaacgggacagtaaacactccacattcttcagtttttcacttctacctacatatttgtatgtttttctgtataacagccttttccttctggttctaactgctgttaaaattaatatatcattatctttgctgttattgacagcgatataattttattacatatgattagagggatgagacagacattcacctgtatatttcttttaatgggcacaaaatgggcccttgcctctaaatagcactttttggggttcaagaagtaatcagtatgcaaagcaatcttttatacaataattgaagtgttccctttttcataattactctacttcccagtaaccctaaggaagttgctaacttaaaaaactgcatcccacgttctgttaatttaattctcataagtagcattcatgtaataaacaggtttttagtttgttcttcagattgatagggagttttaaagaaattttagtagttactaaaattatgttactgtatttttcagaaatccaactgcttatgaaaagtactaatagaacttgttaacctttctaaccttcacgattaactgtgaaatgtacgtcatttgtgcaagaccgtttgtccacttcattttgtataatcacagttgtgttcctgacactcaataaacagtcattgg

SEQ ID NO: 2194 - DNA, 2823 bp, Homo sapiens; identical to SEQ ID NO: 2189

SEQ ID NO: 2195 - DNA, 1770 bp, Homo sapiens; identical to SEQ ID NO: 1845

SEQ ID NO: 2196 - DNA, 2823 bp, Homo sapiens
ggcggggttagcgcctgcgctctggacggctttggggcagggcagatttatatctgcgggggatcagctgacgctccgcattgcagactgcggagtcagacggtgctatgtacgccctcttcctcctggccagcctcctgggcgcggctctagccggcccggtccttggactgaaagaatgcaccaggggctcggcagtgtggtgccagaatgtgaagacggcgtccgactgcggggcagtgaagcactgcctgcagaccgtttggaacaagccaacagtgaaatcccttccctgcgacatatgcaaagacgttgtcaccgcagctggtgatatgctgaaggacaatgccactgaggaggagatccttgtttacttggagaagacctgtgactggcttccgaaaccgaacatgtctgcttcatgcaaggagatagtggactcctacctccctgtcatcctggacatcattaaaggagaaatgagccgtcctggggaggtgtgctctgctctcaacctctgcgagtctctccagaagcacctagcagagctgaatcaccagaagcagctggagtccaataagatcccagagctggacatgactgaggtggtggcccccttcatggccaacatccctctcctcctctaccctcaggacggcccccgcagcaagccccagccaaaggataatggggacgtttgccaggactgcattcagatggtgactgacatccagactgctgtacggaccaactccacctttgtccaggccttggtggaacatgtcaaggaggagtgtgaccgcctgggccctggcatggccgacatatgcaagaactatatcagccagtattctgaaattgctatccagatgatgatgcacatgcaacccaaggagatctgtgcgctggttgggttctgtgatgaggtgaaagagatgcccatgcagactctggtccccgccaaagtggcctccaagaatgtcatccctgccctggaactggtggagcccattaagaagcacgaggtcccagcaaagtctgatgtttactgtgaggtgtgtgaattcctggtgaaggaggtgaccaagctgattgacaacaacaagactgagaaagaaatactcgacgcttttgacaaaatgtgctcgaagctgccgaagtccctgtcggaagagtgccaggaggtggtggacacgtacggcagctccatcctgtccatcctgctggaggaggtcagccctgagctggtgtgcagcatgctgcacctctgctctggcacgcggctgcctgcactgaccgttcacgtgactcagccaaaggacggtggcttctgcgaagtgtgcaagaagctggtgggttatttggatcgcaacctggagaaaaacagcaccaagcaggagatcctggctgctcttgagaaaggctgcagcttcctgccagacccttaccagaagcagtgtgatcagtttgtggcagagtacgagcccgtgctgatcgagatcctggtggaggtgatggatccttccttcgtgtgcttgaaaattggagcctgcccctcggcccataagcccttgttgggaactgagaagtgtatatggggcccaagctactggtgccagaacacagagacagcagcccagtgcaatgctgtcgagcattgcaaacgccatgtgtggaactaggaggaggaatattccatcttggcagaaaccacagcattggtttttttctacttgtgtgtctgggggaatgaacgcacagatctgtttgactttgttataaaaatagggctcccccacctcccccatttctgtgtcctttattgtagcattgctgtctgcaagggagcccctagcccctggcagacatagctgcttcagtgccccttttctctctgctagatggatgttgatgcactggaggtcttttagcctgcccttgcatggcgcctgctggaggaggagagagctctgctggcatgagccacagtttcttgactggaggccatcaaccctcttggttgaggccttgttctgagccctgacatgtgcttgggcactggtgggcctgggcttctgaggtggcctcctgccctgatcagggaccctccccgctttcctgggcctctcagttgaacaaagcagcaaaacaaaggcagttttatatgaaagattagaagcctggaataatcaggctttttaaatgatgtaattcccactgtaatagcatagggattttggaagcagctgctggtggcttgggacatcagtggggccaagggttctctgtccctggttcaactgtgatttggctttcccgtgtctttcctggtgatgccttgtttggggttctgtgggtttgggtgggaagagggccatctgcctgaatgtaacctgctagctctccgaaggccctgcgggcctggcttgtgtgagcgtgtggacagtggtggccgcgctgtgcctgctcgtgttgcctacatgtccctggctgttgaggcgctgcttcagcctgcacccctcccttgtctcatagatgctccttttgaccttttcaaataaatatggatggcgagctcctaggcctctggcttcctggtagagggcggcatgccgaagggtctgctgggtgtggattggatgctggggtgtgggggttggaagctgtctgtggcccacttgggcacccacgcttctgtccacttctggttgccaggagacagcaagcaaagccagcaggacatgaagttgctattaaatggacttcgtgatttttgttttgcactaaagtttctgtgatttaacaataaaattctgttagcca

SEQ ID NO: 2197 - DNA, 1393 bp, Homo sapiens
gcgacggatacagggagggcaagggtttccttttggcgcttccctttggaccccggagtgaaaaactctaacgtccagatcagtggagagaaacgcagatttaggaccctgaggagtctttttcacccgtttcccgtcactcgctcaggcgcgccgagggcagtccttgtggggtcctcgtggccagccaagatggttgcccccgcagtgaaggttgcccgaggatggtcgggcctggcgttgggcgtgcggcgggctgtcttgcagcttccagggctaactcaggtgagatggagccgctatagtcctgaattcaaggatcccttgattgacaaggaatattatcgcaagccagtggaggagctaactgaggaggagaaatatgttcgggagctcaagaagactcagctcatcaaagctgctccagcagggaaaacaagttctgtgtttgaagacccagtcatcagtaaattcaccaacatgatgatgataggaggaaacaaagtactggccagatccctcatgattcagactctggaagctgtgaaaaggaagcagtttgagaagtaccatgccgcttctgcagaggaacaggcaaccatcgaacgcaacccctacaccatcttccatcaagcactgaaaaactgtgagcctatgattgggctggtacccatcctcaagggaggccgtttctaccaggtccctgtacccctacccgaccggcgtcgccgcttcctagccatgaagtggatgatcactgagtgccgggataaaaagcaccagcggacactgatgccggagaagctgtcacacaagctgctggaggctttccataaccagggccccgtgatcaagaggaagcatgacttgcacaagatggcagaggccaaccgtgccctggcccactaccgctggtggtagagtctccaggaggagcccagggccctctgccgcaagaaacagtgtgagctactgccacgctgaaaactacctgtgggttaaggatgtagttcctttgtaagggtgggcaggcctcgtaagaaagatgtagcagcatattcactatccgttaatccttctttctttgaggctggaacttgctctctctgcccctatttccttgtaaagagggagcacattgacttgggaatttcctccaggaaactcagggctgttttctcttcccttaggttggggcggacctttggacatataaaggaagcagttttagtatcagaaaagatttattagaaaattctcacgctgaactggtgtagcatgtggtgcagcattcagtgaaactggctggaggaaataggcttgtttccagagttgtccttatacaaaatgtataaaaagcagtttctggtgaaaaaaaaaaaaaaaaaaaaaa

SEQ ID NO: 2198 - DNA, 3615 bp, Homo sapiens
ggcctgctctccccacctctccgcgctgagcagccacgtcggcggcggtccctggtccagggaggggcgtggcaaaggcccgtgcgcggtacgtgtcccgcccctcgctgcccggagcccggatgaagagtaacgccattaccgccggagccgccgagagccttagccgacggaaactggacactggaccggcagcgccatgagactcctcccccgcttgctgctgcttctcttactcgtgttccctgccactgtcttgttccgaggcggccccagaggcttgttagcagtggcacaagatcttacagaggatgaagaaacagtagaagattccataattgaggatgaagatgatgaagccgaggtagaagaagatgaacccacagatttggtagaagataaagaggaagaagatgtgtctggtgaacctgaagcttcaccgagtgcagatacaactatactgtttgtaaaaggagaagattttccagcaaataacattgtgaagttcctggtaggctttaccaacaagggtacagaagattttattgttgaatccttagatgcctcattccgttatcctcaggactaccagttttatatccagaatttcacagctcttcctctgaacactgtagtgccaccccagagacaggcaacttttgagtactctttcattcctgcagagcccatgggcggacgaccatttggtttggtcatcaatctgaactacaaagatttgaacggcaatgtattccaagatgcagtcttcaatcaaacagttacagttattgaaagagaggatgggttagatggagaaacaatctttatgtatatgttccttgctggtcttgggcttctggttattgttggccttcatcaactcctagaatctagaaagcgtaagagacccatacagaaagtagaaatgggtacatcaagtcagaatgatgttgacatgagttggattcctcaggaaacattgaatcaaatcaataaagcttcaccaagaaggttgcccaggaaacgggcacagaagagatcagtgggatctgatgagtaaatgttcctttgtgcaacaattcggtctttacttaacctgccctaatatttttcggcctgatgggaattagtgcagagaagccatgtcaccatagaaggcaactcctacttgtgtgtggactgagcaatcagagtctgtggcgataatattgctgaaaatgcactgcattcatttttctaaagtaacaaatttggtttttttttaaaccattaaaatctatgtgtgtgcgtgtgtatgtatgtgagcagttggtcttaccagaatcattgttgaactacctgaaacaagtctttagaatactaaatataatgctgttgtctcttcctttttgacattttctgattttttcccccaaaactcagttaatatttacccactatgattattgatgtcctgccttgaacagttttaaagaaaacaatttttggaatagctcaaatttcaattgatggcacaaatcagcattttgttgttgttactgtattacaattagtattctaaaggcagaagcagaagtagctgctttttagcaatagaattgtttcagtattttgctgctgtttaatgcgcatcttcagaaaacttcccagtggcttcaaggaatttggggatctctctggcaacaaattgtgaaacatgaaatttctgctgactttaatatatgaaacctaatcctacccccttttttaacaaaaagaaactagtacatttgtgaaaattgtgttgtgttgtccattgttgctctagttctgacccagaggtagctctggagtgattttagacctactcactcagttgtgtgtaggtttttttgttttgttttgagagagaatttttctctccttaatagaagcatcctttttaaagagaagttgccttggtccacacactaagcagaaaaccaagttatcaggacagagatatttcccagttactcctaatcaatgaagaaagtgagttggatatttttaaagcagttaactaattttttcttacctaatcttttgggagttttgcttgttgatataacctttttagttaacctgaaagattccaaaaattgttcttaagtgcttgagactggaaccaaaattaaattgtacttcataaaatcctcttatagagttactcttgccctagattgtaaattaagtttggcattattgtcagactggatggagggtgaagtaaaatagtatgaacaattaagaggctctccccctcttgtctttaagccatattctcctacatgtattttataagaaaatgttaagtcaaattttagtggctctttaattcctgacctcttcattctccttttcagtataacctcccctatgctcatgcccacacagacaaaaaaacaaaacgaaatacacacagaaaaaagtctttccaaactgtttaagtatttaaacatctgagccaaagcagatagaagttattgtataattgttaatcactttgcaaataggggctatcaaattacctatattggcattgctggattataaactctatatctgtaatataaagtgtttgagtttttaattgggctgttatgatcagtagttgattttgagaaagctctatgagctctaagtaactgcatggttttttgtttaatgtaatataggagacccttcacattcccaaggaatatattccaaaacatttttgtgaatatctaagtttgtgaaactactagggcatgatacagtaaggtgtaattacagaatttacgaaatgtaaatgacctctacagagttttatggaatacctggtactaacgtaggcagctgcaaaaccacactgagttacagctgtcagccctcctcattcctaaataacttgccttacatatcagccctcccacttctgaagttcaaattagtgcctcggaaatgtagaatttattatttgtcatttttttttttttagcatagattgagaacagttgaactcttaaatcctcagatgccaggggtctgctctagcatcagtaagtatttagcagaaactaactccgtaatgaatggaattcaattccacacatggtttgttcaagcacacttaataagtagcctattttttaaatgtctttttaaaatgtaaatatttggatgaagtttttctttgttttgatatattcatttgctacaccaactatgttttcagaattcatcttttgaacaacttggtttcagaatatgtaaaatgactttaaggatcttgtgtatcaaacctatccccggatgtgtgagaataatgtgttcataaagcatggatctcgctttggttgtatagcttcctcatttacttcatggtcttacatagctggtgactttcagggctaatctgccctctaaagcattgtcccaggagaggaaaaggaaatgggacctcagaagtagaagcctcagggaaggagtaaagtagaaatcagaagaaaagaagcttcacttgatagtaataaggtttttaacttcaagtaccttcagaaaatgtgattttgataagaggaaagggcaaatttagaccttaaaaaatatgga

SEQ ID NO: 2199 - DNA, 2144 bp, Homo sapiens
ggcctgctctccccacctctccgcgctgagcagccacgtcggcggcggtccctggtccagggaggggcgtggcaaaggcccgtgcgcggtacgtgtcccgcccctcgctgcccggagcccggatgaagagtaacgccattaccgccggagccgccgagagccttagccgacggaaactggacactggaccggcagcgccatgagactcctcccccgcttgctgctgcttctcttactcgtgttccctgccactgtcttgttccgaggcggccccagaggcttgttagcagtggcacaagatcttacagaggatgaagaaacagtagaagattccataattgaggatgaagatgatgaagccgaggtagaagaagatgaacccacagatttggttaaagataaagaggaagaagatgtgtctggtgaacctgaagcttcaccgagtgcagatacaactatactgtttgtaaaaggagaagattttccagcaaataacattgtgaagttcctggtaggctttaccaacaagggtacagaagattttattgttgaatccttagatgcctcattccgttatcctcaggactaccagttttatatccagaatttcacagctcttcctctgaacactgtagtgccaccccagagacaggcaacttttgagtactctttcattcctgcagagcccatgggcggacgaccatttggtttggtcatcaatctgaactacaaagatttgaacggcaatgtattccaagatgcagtcttcaatcaaacagttacagttattgaaagagaggatgggttagatggagaaacaatctttatgtatatgttccttgctggtcttgggcttctggttattgttggccttcatcaactcctagaatctagaaagcgtaagagacccatacagaaagtagaaatgggtacatcaagtcagaatgatgttgacatgagttggattcctcaggaaacattgaatcaaatcaataaagcttcaccaagaaggttgcccaggaaacgggcacagaagagatcagtgggatctgatgagtaaatgttcctttgtgcaacaattcggtctttacttaacctgccctaatatttttcggcctgatgggaattagtgcagagaagccatgtcaccatagaaggcaactcctacttgtgtgtggactgagcaatcagagtctgtggcgataatattgctgaaaatgcactgcattcatttttctaaacatagattgagaacagttgaactcttaaatcctcagatgccaggggtctgctctagcatcaacgcaggaggagggagacgcactgatgacatcgggccgctcctgcagctcgggcgcctcgcagtctccaggtgcaaggccagcgcttccgccgtggctgcttcaggacatcccccagcacagccgttcctggagacccggccatcttttctgcatcgttttgcaatttgtgaaacttaggacagcagccgcctgttcaaccgggccctccgccggatggctctgggaagtcaccgctgggcatggctgtgtcactagggctttgtggctgatgaataacagctgtcgtgtgctgtttctgggtggagatgtcccaggaaaccagtcctactctgccagccagtaggatggggatgcaggtcccgccagcaaggactggctgaaccgtgcgacccatgcagtagggcccttgggtcagctgtccccacccactacactgatggtgaatgaggccagaagacagggggctctgcgtgaagcccaccagcccctgccacgtgatggttggaacgcgtaccttagagcttccagttccgtcttaggacattttcaaagatgagcgtcctcaggaggggcggtggagggggcatgtctggagggacctgaggcacggggagcgctcggtgcccaggccgagcagtgccacacgtgcgcacgagttatgcctgcaaacacgggttacgcctgtgagaccagtgggctccttccagccgggctgcctgaggccactgtctgtgtgttggtgcccattgtgggctccggggcgctcttcccttgtgctgacgtgagtggagttgaattgccctgaatcagattagactgaaataaactgaattgaaaggc

SEQ ID NO: 2200 - DNA, 3521 bp, Homo sapiens
ggcctgctctccccacctctccgcgctgagcagccacgtcggcggcggtccctggtccagggaggggcgtggcaaaggcccgtgcgcggtacgtgtcccgcccctcgctgcccggagcccggatgaagagtaacgccattaccgccggagccgccgagagccttagccgacggaaactggacactggaccggcagcgccatgagactcctcccccgcttgctgctgcttctcttactcgtgttccctgccactgtcttgttccgaggcggccccagaggcttgttagcagtggcacaagatcttacagaggatgaagaaacagtagaagattccataattgaggatgaagatgatgaagccgaggtagaagaagatgaacccacagatttggtagaagataaagaggaagaagatgtgtctggtgaacctgaagcttcaccgagtgcagatacaactatactgtttgtaaaaggagaagattttccagcaaataacattgtgaagttcctggtaggctttaccaacaagggtacagaagattttattgttgaatccttagatgcctcattccgttatcctcaggactaccagttttatatccagaatttcacagctcttcctctgaacactgtagtgccaccccagagacaggcaacttttgagtactctttcattcctgcagagcccatgggcggacgaccatttggtttggtcatcaatctgaactacaaagatttgaacggcaatgtattccaagatgcagtcttcaatcaaacagttacagttattgaaagagaggatgggttagatggagaaacaatctttatgtatatgttccttgctggtcttgggcttctggttattgttggccttcatcaactcctagaatctagaaagataaagcttcaccaagaaggttgcccaggaaacgggcacagaagagatcagtgggatctgatgagtaaatgttcctttgtgcaacaattcggtctttacttaacctgccctaatatttttcggcctgatgggaattagtgcagagaagccatgtcaccatagaaggcaactcctacttgtgtgtggactgagcaatcagagtctgtggcgataatattgctgaaaatgcactgcattcatttttctaaagtaacaaatttggtttttttttaaaccattaaaatctatgtgtgtgcgtgtgtatgtatgtgagcagttggtcttaccagaatcattgttgaactacctgaaacaagtctttagaatactaaatataatgctgttgtctcttcctttttgacattttctgattttttcccccaaaactcagttaatatttacccactatgattattgatgtcctgccttgaacagttttaaagaaaacaatttttggaatagctcaaatttcaattgatggcacaaatcagcattttgttgttgttactgtattacaattagtattctaaaggcagaagcagaagtagctgctttttagcaatagaattgtttcagtattttgctgctgtttaatgcgcatcttcagaaaacttcccagtggcttcaaggaatttggggatctctctggcaacaaattgtgaaacatgaaatttctgctgactttaatatatgaaacctaatcctacccccttttttaacaaaaagaaactagtacatttgtgaaaattgtgttgtgttgtccattgttgctctagttctgacccagaggtagctctggagtgattttagacctactcactcagttgtgtgtaggtttttttgttttgttttgagagagaatttttctctccttaatagaagcatcctttttaaagagaagttgccttggtccacacactaagcagaaaaccaagttatcaggacagagatatttcccagttactcctaatcaatgaagaaagtgagttggatatttttaaagcagttaactaattttttcttacctaatcttttgggagttttgcttgttgatataacctttttagttaacctgaaagattccaaaaattgttcttaagtgcttgagactggaaccaaaattaaattgtacttcataaaatcctcttatagagttactcttgccctagattgtaaattaagtttggcattattgtcagactggatggagggtgaagtaaaatagtatgaacaattaagaggctctccccctcttgtctttaagccatattctcctacatgtattttataagaaaatgttaagtcaaattttagtggctctttaattcctgacctcttcattctccttttcagtataacctcccctatgctcatgcccacacagacaaaaaaacaaaacgaaatacacacagaaaaaagtctttccaaactgtttaagtatttaaacatctgagccaaagcagatagaagttattgtataattgttaatcactttgcaaataggggctatcaaattacctatattggcattgctggattataaactctatatctgtaatataaagtgtttgagtttttaattgggctgttatgatcagtagttgattttgagaaagctctatgagctctaagtaactgcatggttttttgtttaatgtaatataggagacccttcacattcccaaggaatatattccaaaacatttttgtgaatatctaagtttgtgaaactactagggcatgatacagtaaggtgtaattacagaatttacgaaatgtaaatgacctctacagagttttatggaatacctggtactaacgtaggcagctgcaaaaccacactgagttacagctgtcagccctcctcattcctaaataacttgccttacatatcagccctcccacttctgaagttcaaattagtgcctcggaaatgtagaatttattatttgtcatttttttttttttagcatagattgagaacagttgaactcttaaatcctcagatgccaggggtctgctctagcatcagtaagtatttagcagaaactaactccgtaatgaatggaattcaattccacacatggtttgttcaagcacacttaataagtagcctattttttaaatgtctttttaaaatgtaaatatttggatgaagtttttctttgttttgatatattcatttgctacaccaactatgttttcagaattcatcttttgaacaacttggtttcagaatatgtaaaatgactttaaggatcttgtgtatcaaacctatccccggatgtgtgagaataatgtgttcataaagcatggatctcgctttggttgtatagcttcctcatttacttcatggtcttacatagctggtgactttcagggctaatctgccctctaaagcattgtcccaggagaggaaaaggaaatgggacctcagaagtagaagcctcagggaaggagtaaagtagaaatcagaagaaaagaagcttcacttgatagtaataaggtttttaacttcaagtaccttcagaaaatgtgattttgataagaggaaagggcaaatttagaccttaaaaaatatgga

SEQ ID NO: 2201 - DNA, 1881 bp, Homo sapiens
ggcgcgacgcgccaccaccgccgagaccgcgtccgccccgcgagcacagagcctcgcctttgccgatccgccgcccgtccacacccgccgccagctcaccatggatgatgatatcgccgcgctcgtcgtcgacaacggctccggcatgtgcaaggccggcttcgcgggcgacgatgccccccgggccgtcttcccctccatcgtggggcgccccaggcaccagggcgtgatggtgggcatgggtcagaaggattcctatgtgggcgacgaggcccagagcaagagaggcatcctcaccctgaagtaccccatcgagcacggcatcgtcaccaactgggacgacatggagaaaatctggcaccacaccttctacaatgagctgcgtgtggctcccgaggagcaccccgtgctgctgaccgaggcccccctgaaccccaaggccaaccgcgagaagatgacccaggactctcttctctgacctgagtctcctttggaactctgcagatcatgtttgagaccttcaacaccccagccatgtacgttgctatccaggctgtgctatccctgtacgcctctggccgtaccactggcatcgtgatggactccggtgacggggtcacccacactgtgcccatctacgaggggtatgccctcccccatgccatcctgcgtctggacctggctggccgggacctgactgactacctcatgaagatcctcaccgagcgcggctacagcttcaccaccacggccgagcgggaaatcgtgcgtgacattaaggagaagctgtgctacgtcgccctggacttcgagcaagagatggccacggctgcttccagctcctccctggagaagagctacgagctgcctgacggccaggtcatcaccattggcaatgagcggttccgctgccctgaggcactcttccagccttccttcctgggcatggagtcctgtggcatccacgaaactaccttcaactccatcatgaagtgtgacgtggacatccgcaaagacctgtacgccaacacagtgctgtctggcggcaccaccatgtaccctggcattgccgacaggatgcagaaggagatcactgccctggcacccagcacaatgaagatcaagatcattgctcctcctgagcgcaagtactccgtgtggatcggcggctccatcctggcctcgctgtccaccttccagcagatgtggatcagcaagcaggagtatgacgagtccggcccctccatcgtccaccgcaaatgcttctaggcggactatgacttagttgcgttacaccctttcttgacaaaacctaacttgcgcagaaaacaagatgagattggcatggctttatttgttttttttgttttgttttggttttttttttttttttggcttgactcaggatttaaaaactggaacggtgaaggtgacagcagtcggttggagcgagcatcccccaaagttcacaatgtggccgaggactttgattgcacattgttgtttttttaatagtcattccaaatatgagatgcattgttacaggaagtcccttgccatcctaaaagccaccccacttctctctaaggagaatggcccagtcctctcccaagtccacacaggggaggtgatagcattgctttcgtgtaaattatgtaatgcaaaatttttttaatcttcgccttaatacttttttattttgttttattttgaatgatgagccttcgtgcccccccttcccccttttttgtcccccaacttgagatgtatgaaggcttttggtctccctgggagtgggtggaggcagccagggcttacctgtacactgacttgagaccagttgaataaaagtgcacaccttaaaaatgaggccaagtgtga

SEQ ID NO: 2202 - DNA, 1895 bp, Homo sapiens
tgagctcttccacccagcgtgcacttgcctcccccctgcctccaggtgcggcaccacctcctctctctcttaagggtttaaacttgccacttcaaagttcgccatggatgatgatattgctgctctcgtggtcgacaatggctccggaatgtgcaaagctggttttgcaggagacgatgcccctcgggccgtcttcccttccattgttgggcgccccagacatcagggtgtgatggtgggtatgggccagaaagacagctacgtgggggatgaggcccagagcaagagaggtattctgaccctgaagtaccccattgaacacggtattgtcaccaactgggatgacatggagaagatctggcatcatactttctacaatgagctccgtgtggcccctgaagagcaccctgtgctgctgacagaagcccccctgaaccccaaagccaacagagaaaagatgactcagattatgtttgagaccttcaacaccccagccatgtacgttgccatccaggctgtgctgtccctgtatgcctctggtcgtaccactggtattgtgatggactccggtgatggtgtgacccacactgtgcccatctatgaaggttatgcccttccccatgccatcctccgtctggatctggctggccgtgatctgacggactacctcatgaagatcctgaccgagagagggtacagtttcactaccacagctgagagggaaatcgtgcgtgacatcaaggagaagctgtgttacgtcgccctagacttcgagcaggagatggccactgctgcatctagctcttctctggaaaagagctacgagctccctgatggtcaggtcatcaccattggcaacgagaggttccgatgcccagaagccctcttccaaccatctttcttaggtatggaatcctgtggaatccacgaaactaccttcaactcaatcatgaagtgtgatgttgacatccgtaaggatttgtatgccaataccgtattgtctggtggtaccaccatgtacccaggcattgctgacaggatgcagaaggagattacagccctagctcccagcacaatgaaaatcaagatcattgccccacctgagcgtaaatactctgtctggattggaggctccatcctggcctctctttccaccttccagcagatgtggatcagcaagcaggagtatgatgaatctgggccctccattgtccaccgcaaatgcttctaaatggactgtttgtgtttttttgatttttttttttttttttttgtcaaagggtgtgacatgataattgcccaaaaaaagagatgagattggcatggctttatttgtttttttttttgttttggtttttttttttttttttttttggcgcttgactcaggatttaaaaactggaacggtgaaggtgatgagcagtctaatgtgttggaggcaaacatccccaaagttctacagtgcgtcttcaggactcagattgtacatttgttttgtttttttaatagtcattccaaatattgtataatgcattgttacagagttacaagcctctgtgaaggctgtcctttgctagagcaaaggagctatgtaacaaaaatccagtgggggaggggggaggggggaaggtactagtattgctttacatgtaaattatgtaatcctttaaaaaacaaaaaaactttttgtatcttccgccttaatacttgttccttttttttttttttaaattgtcagccataatgaatggccccctaaattccctccctgcccccaacatagatgtgaatgaagactttacagtctccctgcgagttttttgagattggtgccagtacttgggggaggggaggagctttacctgtacactgacttaagaccagttcaaataaaa

SEQ ID NO: 2203 - DNA, 1840 bp, Homo sapiens
ggcgcgacgcgccaccaccgccgagaccgcgtccgccccgcgagcacagagcctcgcctttgccgatccgccgcccgtccacacccgccgccagctcaccatggatgatgatatcgccgcgctcgtcgtcgacaacggctccggcatgtgcaaggccggcttcgcgggcgacgatgccccccgggccgtcttcccctccatcgtggggcgccccaggcaccagggcgtgatggtgggcatgggtcagaaggattcctatgtgggcgacgaggcccagagcaagagaggcatcctcaccctgaagtaccccatcgagcacggcatcgtcaccaactgggacgacatggagaaaatctggcaccacaccttctacaatgagctgcgtgtggctcccgaggagcaccccgtgctgctgaccgaggcccccctgaaccccaaggccaaccgcgagaagatgacccagatcatgtttgagaccttcaacaccccagccatgtacgttgctatccaggctgtgctatccctgtacgcctctggccgtaccactggcatcgtgatggactccggtgacggggtcacccacactgtgcccatctacgaggggtatgccctcccccatgccatcctgcgtctggacctggctggccgggacctgactgactacctcatgaagatcctcaccgagcgcggctacagcttcaccaccacggccgagcgggaaatcgtgcgtgacattaaggagaagctgtgctacgtcgccctggacttcgagcaagagatggccacggctgcttccagctcctccctggagaagagctacgagctgcctgacggccaggtcatcaccattggcaatgagcggttccgctgccctgaggcactcttccagccttccttcctgggcatggagtcctgtggcatccacgaaactaccttcaactccatcatgaagtgtgacgtggacatccgcaaagacctgtacgccaacacagtgctgtctggcggcaccaccatgtaccctggcattgccgacaggatgcagaaggagatcactgccctggcacccagcacaatgaagatcaagatcattgctcctcctgagcgcaagtactccgtgtggatcggcggctccatcctggcctcgctgtccaccttccagcagatgtggatcagcaagcaggagtatgacgagtccggcccctccatcgtccaccgcaaatgcttctaggcggactatgacttagttgcgttacaccctttcttgacaaaacctaacttgcgcagaaaacaagatgagattggcatggctttatttgttttttttgttttgttttggttttttttttttttttggcttgactcaggatttaaaaactggaacggtgaaggtgacagcagtcggttggagcgagcatcccccaaagttcacaatgtggccgaggactttgattgcacattgttgtttttttaatagtcattccaaatatgagatgcattgttacaggaagtcccttgccatcctaaaagccaccccacttctctctaaggagaatggcccagtcctctcccaagtccacacaggggaggtgatagcattgctttcgtgtaaattatgtaatgcaaaatttttttaatcttcgccttaatacttttttattttgttttattttgaatgatgagccttcgtgcccccccttcccccttttttgtcccccaacttgagatgtatgaaggcttttggtctccctgggagtgggtggaggcagccagggcttacctgtacactgacttgagaccagttgaataaaagtgcacaccttaaaaatgaggccaagtgtga

SEQ ID NO: 2204 - DNA, 1840 bp, Homo sapiens; identical to SEQ ID NO: 2203

SEQ ID NO: 2205 - DNA, 1207 bp, Homo sapiens
atgttgctgaaggaaacaggatctgcttagtgaaagaagtggcaagcaatggatcccaaatatcagcgtgtagagctaaatgatggtcacttcatgcccgtattgggatttggcacctatgcacctccagaggttccgaggaacagagctgtagaggtcaccaaattagcaatagaagctggcttccgccatattgattctgcttatttatacaataatgaggagcaggttggactggccatccgaagcaagattgcagatggcagtgtgaagagagaagacatattctacacttcaaagctttggtgcactttctttcaaccacagatggtccaaccagccttggaaagctcactgaaaaaacttcaactggactatgttgacctctatcttcttcatttcccaatggctctcaagccaggtgagacgccactaccaaaagatgaaaatggaaaagtaatattcgacacagtggatctctctgccacatgggaggtcatggagaagtgtaaggatgcaggattggccaagtccatcggggtgtcaaacttcaactgcaggcagctggagatgatcctcaacaagccaggactcaagtacaagcctgtctgcaaccaggtagaatgtcatccttacctcaaccagagcaaactgctggatttctgcaagtcaaaagacattgttctggttgcccacagtgctctgggaacccaacgacataaactatgggtggacccaaactccccagttcttttggaggacccagttctttgtgccttagcaaagaaacacaaacgaaccccagccctgattgccctgcgctaccagctgcagcgtggggttgtggtcctggccaagagctacaatgagcagcggatcagagagaacatccaggtttttgaattccagttgacatcagaggatatgaaagttctagatggtctaaacagaaattatcgatatgttgtcatggattttcttatggaccatcctgattatccattttcagatgaatattagcatagagggtgttgcacgacatctagcagaaggccctgtgtgtggatggtgatgcagaggatgtctctatgctggtgactggacacacggcctctggttaaatccctcccctcctgcttggcaacttcagctagctagatatatccatggtccagaaagcaaacataataaatttttatcttgaagt

SEQ ID NO: 2206 - DNA, 778 bp, Homo sapiens
cccccaggttcctaaaagtaaagctttagaggccaccaaattggcaattgaagctggcttccgccatattgattctgctcatttatacaataatgaggagcaggttggactggccatccgaagcaagattgcagatggcagtgtgaagagagaagacatattctacacttcaaagctttggtgcaattcccatcgaccagagttggtccgaccagccttggaaaggtcactgaaaaatcttcaattggattatgttgacctctaccttattcattttccagtgtctgtaaagccaggtgaggaagtgatcccaaaagatgaaaatggaaaaatactatttgacacagtggatctctgtgccacgtgggaggccgtggagaagtgtaaagatgcaggattggccaagtccatcggggtgtccaacttcaaccgcaggcagctggagatgatcctcaacaagccagggctcaagtacaagcctgtctgcaaccaggtggaatgtcatccttacttcaaccagagaaaactgctggatttctgcaagtcaaaagacattgttctggttgcctatagtgctctgggatcccatcgagaagaaccatgggtggacccgaactccccggtgctcttggaggacccagtcctttgtgccttggcaaaaaagcacaagcgaaccccagccctgattgccctgcgctaccagctgcagcgtggggttgtggtcctggccaagagctacaatgagcagcgcatcagacagaacgtgcaggtgaggagc

SEQ ID NO: 2207 - DNA, 1194 bp, Homo sapiens
acaggatctgcttagtgaaagaagtggcaagcaatggatcccaaatatcagcgtgtagagctaaatgatggtcacttcatgcccgtattgggatttggcacctatgcacctccagaggttccgaggaacagagctgtagaggtcaccaaattagcaatagaagctggcttccgccatattgattctgcttatttatacaataatgaggagcaggttggactggccatccgaagcaagattgcagatggcagtgtgaagagagaagacatattctacacttcaaagctttggtgcactttctttcaaccacagatggtccaaccagccttggaaagctcactgaaaaaacttcaactggactatgttgacctctatcttcttcatttcccaatggctctcaagccaggtgagacgccactaccaaaagatgaaaatggaaaagtaatattcgacacagtggatctctctgccacatgggaggtcatggagaagtgtaaggatgcaggattggccaagtccatcggggtgtcaaacttcaactgcaggcagctggagatgatcctcaacaagccaggactcaagtacaagcctgtctgcaaccaggtagaatgtcatccttacctcaaccagagcaaactgctggatttctgcaagtcaaaagacattgttctggttgcccacagtgctctgggaacccaacgacataaactatgggtggacccaaactccccagttcttttggaggacccagttctttgtgccttagcaaagaaacacaaacaaaccccagccctgattgccctgcgctaccagctgcagcgtggggttgtggtcctggccaagagctacaatgagcagcggatcagagagaacatccaggtttttgaattccagttgacatcagaggatatgaaagttctagatggtctaaacagaaattatcgatatgttgtcatggattttcttatggaccatcctgattatccattttcagatgaatattagcatagagggtgttgcacgacatctagcagaaggccctgtgtgtggatggtgatgcagaggatgtctctatgctggtgactggacacacagcctctggttaaatccctcccctcctgcttggcaacttcagctagctagatatatccatggtccagaaagcaaacataataaatttttatcttgaagtaa

SEQ ID NO: 2208 - DNA, 778 bp, Homo sapiens; identical to SEQ ID NO: 2206

SEQ ID NO: 2209 - DNA, 1294 bp, Homo sapiens
gtaagaaacggttgaactggatgcaatttttatcacagcttgtgtaagactgcctctgtccctcctctcacatgccattggttaaccagcagacagtgtgctcaggggcgttgcagctcattgctcttatagcctgtgagggcacggaagaaacatttgctaaccaggccagtgacagaaatggattcgaaataccagtgtgtgaagctgaatgatggtcacttcatgcctgtcctgggatttggcacctatgcgcctgcagaggttcctaaaagtaaagctctagaggccgtcaaattggcaatagaagccgggttccaccatattgattctgcacatgtttacaataatgaggagcaggttggactggccatccgaagcaagattgcagatggcagtgtgaagagagaagacatattctacacttcaaagctttggagcaattcccatcgaccagagttggtccgaccagccttggaaaggtcactgaaaaatcttcaattggactatgttgacctctatcttattcattttccagtgtctgtaaagccaggtgaggaagtgatcccaaaagatgaaaatggaaaaatactatttgacacagtggatctctgtgccacatgggaggccatggagaagtgtaaagatgcaggattggccaagtccatcggggtgtccaacttcaaccacaggctgctggagatgatcctcaacaagccagggctcaagtacaagcctgtctgcaaccaggtggaatgtcatccttacttcaaccagagaaaactgctggatttctgcaagtcaaaagacattgttctggttgcctatagtgctctgggatcccatcgagaagaaccatgggtggacccgaactccccggtgctcttggaggacccagtcctttgtgccttggcaaaaaagcacaagcgaaccccagccctgattgccctgcgctaccagctgcagcgtggggttgtggtcctggccaagagctacaatgagcagcgcatcagacagaacgtgcaggtgttttgctggcccccctaattatccattttctgatgaatattaacatggagggcattgcatgaggtctgccagaaggccctgcgtgtggatggtgacacagaggatggctctatgctggtgactggacacatcgcctctggttaaatctctcctgcttggcgacttcagtaagctacagctaagcccatcggccggaaaagaaagacaataattttgtttttcattttgaaaaaattaaatgctctctcctaaagattcttcacct

SEQ ID NO: 2210 - DNA, 2532 bp, Homo sapiens
cgctgcgaagtcggggacggggcggggctggcggcgggggcggggacccggagcgggaagatggcggcggcgcaggaggcggacggggcccgcagcgccgtggtggcggccgggggaggcagctccggtcaggtgaccagcaatggcagcatcgggagggacccgccagcggagacccagcctcagaacccaccggcccagccggcacccaatgcctggcaggtcatcaaaggtgtgctgtttaggatcttcatcatctgggccatcagcagttggttccgccgagggccggcccctcaggaccaggcgggccccggaggagccccacgcgtcgccagccgcaacctgttccccaaagacactttaatgaacctgcatgtgtacatctcagagcacgagcactttacagacttcaacgccacgtcggcactcttctgggaacagcacgatcttgtgtatggcgactggactagcggcgagaactcagacggctgctacgagcactttgctgagctcgatatcccacagagcgtccagcagaacggctccatctacatccacgtttacttcaccaagagtggcttccacccagacccccggcagaaggccctgtaccgccggcttgccacagtccacatgtcccggatgatcaacaaatacaagcgcagacgatttcagaaaaccaagaacctgctgacaggagagacagaagcggacccagaaatgatcaagagggctgaggactatgggcctgtggaggtgatctcccattggcaccccaacatcaccatcaacatcgtggacgaccacacgccgtgggtgaagggcagtgtgccccctcccctggatcaatatgtgaagttcgacgccgtgagcggtgactactatcccatcatctacttcaatgactactggaacctgcagaaggactactaccccatcaacgagagcctggccagcctgccgctccgcgtctccttctgcccactctcgctttggcgctggcagctctatgctgcccagagcaccaagtcgccctggaacttcctgggtgatgagttgtacgagcagtcagatgaggagcaggactcggtgaaggtggccctgctggagaccaacccctacctgctggcgctcaccatcatcgtgtctatcgttcacagtgtcttcgagttcctggccttcaagaatgatatccagttctggaacagccggcagtccctggagggcctgtccgtgcgctccgtcttcttcggcgttttccagtcattcgtggtcctcctctacatcctggacaacgagaccaacttcgtggtccaggtcagcgtcttcattggggtcctcatcgacctctggaagatcaccaaggtcatggacgtccggctggaccgagagcacagggtggcaggaatcttcccccgcctatccttcaaggacaagtccacgtatatcgagtcctcgaccaaagtgtatgatgatatggcattccggtacctgtcctggatcctcttcccgctcctgggctgctatgccgtctacagtcttctgtacctggagcacaagggctggtactcctgggtgctcagcatgctctacggcttcctgctgaccttcggcttcatcaccatgacgccccagctcttcatcaactacaagctcaagtctgtggcccaccttccctggcgcatgctcacctacaaggccctcaacacattcatcgacgacctgttcgcctttgtcatcaagatgcccgttatgtaccggatcggctgcctgcgggacgatgtggttttcttcatctacctctaccaacggtggatctaccgcgtcgaccccacccgagtcaacgagtttggcatgagtggagaagaccccacagctgccgcccccgtggccgaggttcccacagcagcaggggccctcacgcccacacctgcacccaccacgaccaccgccaccagggaggaggcctccacgtccctgcccaccaagcccacccagggggccagctctgccagcgagccccaggaagcccctccaaagccagcagaggacaagaaaaaggattagtcgagactggtcctcacctgctccggctcctggcgaccactacccctgcgtcccggccccctcgcctcccctccctgtcgccctttccctggacagatcaggccggggcggtgggaggcccgcctcaggtcagggcccagcgtgtgacgtaggggccggggcaggccagggtttgtttgtggaggcgctgtctgtccctctgtccctctgtgtttccagccatctcgccctgccagcccagcaccactgggaatcatggtgaagctgatgcagcgttgccgagggggtgggttgggcgggggtggggccgggcccccctacgggatgcccacggccgttcatcatcttgtccctcgtccccctaccacactccccctcctagaccgccgccctttaacacagtctggatttaataaattcatatgggtgtttaacttaaactcagcactgcccctcctcctc

SEQ ID NO: 2211 - DNA, 2494 bp, Homo sapiens
gcagatggccgggtttagagctgtacgaagacacacagctaatgaaaaattgtggaattctcagagcccgtgaagcctagcccacggatgcgaggtgaccagcaatggcagcatcgggagggacccgccagcggagacccagcctcagaacccaccggcccagccggcacccaatgcctggcaggtcatcaaaggtgtgctgtttaggatcttcatcatctgggccatcagcagttggttccgccgagggccggcccctcaggaccaggcgggccccggaggagccccacgcgtcgccagccgcaacctgttccccaaagacactttaatgaacctgcatgtgtacatctcagagcacgagcactttacagacttcaacgccacgtcggcactcttctgggaacagcacgatcttgtgtatggcgactggactagcggcgagaactcagacggctgctacgagcactttgctgagctcgatatcccacagagcgtccagcagaacggctccatctacatccacgtttacttcaccaagagtggcttccacccagacccccggcagaaggccctgtaccgccggcttgccacagtccacatgtcccggatgatcaacaaatacaagcgcagacgatttcagaaaaccaagaacctgctgacaggagagacagaagcggacccagaaatgatcaagagggctgaggactatgggcctgtggaggtgatctcccattggcaccccaacatcaccatcaacatcgtggacgaccacacgccgtgggtgaagggcagtgtgccccctcccctggatcaatatgtgaagttcgacgccgtgagcggtgactactatcccatcatctacttcaatgactactggaacctgcagaaggactactaccccatcaacgagagcctggccagcctgccgctccgcgtctccttctgcccactctcgctttggcgctggcagctctatgctgcccagagcaccaagtcgccctggaacttcctgggtgatgagttgtacgagcagtcagatgaggagcaggactcggtgaaggtggccctgctggagaccaacccctacctgctggcgctcaccatcatcgtgtctatcgttcacagtgtcttcgagttcctggccttcaagaatgatatccagttctggaacagccggcagtccctggagggcctgtccgtgcgctccgtcttcttcggcgttttccagtcattcgtggtcctcctctacatcctggacaacgagaccaacttcgtggtccaggtcagcgtcttcattggggtcctcatcgacctctggaagatcaccaaggtcatggacgtccggctggaccgagagcacagggtggcaggaatcttcccccgcctatccttcaaggacaagtccacgtatatcgagtcctcgaccaaagtgtatgatgatatggcattccggtacctgtcctggatcctcttcccgctcctgggctgctatgccgtctacagtcttctgtacctggagcacaagggctggtactcctgggtgctcagcatgctctacggcttcctgctgaccttcggcttcatcaccatgacgccccagctcttcatcaactacaagctcaagtctgtggcccaccttccctggcgcatgctcacctacaaggccctcaacacattcatcgacgacctgttcgcctttgtcatcaagatgcccgttatgtaccggatcggctgcctgcgggacgatgtggttttcttcatctacctctaccaacggtggatctaccgcgtcgaccccacccgagtcaacgagtttggcatgagtggagaagaccccacagctgccgcccccgtggccgaggttcccacagcagcaggggccctcacgcccacacctgcacccaccacgaccaccgccaccagggaggaggcctccacgtccctgcccaccaagcccacccagggggccagctctgccagcgagccccaggaagcccctccaaagccagcagaggacaagaaaaaggattagtcgagactggtcctcacctgctccggctcctggcgaccactacccctgcgtcccggccccctcgcctcccctccctgtcgccctttccctggacagatcaggccggggcggtgggaggcccgcctcaggtcagggcccagcgtgtgacgtaggggccggggcaggccagggtttgtttgtggaggcgctgtctgtccctctgtccctctgtgtttccagccatctcgccctgccagcccagcaccactgggaatcatggtgaagctgatgcagcgttgccgagggggtgggttgggcgggggtggggccgggcccccctacgggatgcccacggccgttcatcatcttgtccctcgtccccctaccacactccccctcctagaccgccgccctttaacacagtctggatttaataaattcatatgggtgtttaacttaaactcagcactgcccctcctcctc

SEQ ID NO: 2212 - DNA, 2364 bp, Homo sapiens
cagcggccgggaaggggcggtgcgggaggcggggtgtggggcggtagtgtgggccctgttcctgcccgcgcggtgttccgcattctgcaagcctccggagcgcacgtcggcagtcggctccctcgttgaccgaatcaccgacctctctccccagctgtatttccaaaatgtcgctttctaacaagctgacgctggacaagctggacgttaaagggaagcgggtcgttatgagagtcgacttcaatgttcctatgaagaacaaccagataacaaacaaccagaggattaaggctgctgtcccaagcatcaaattctgcttggacaatggagccaagtcggtagtccttatgagccacctaggccggcctgatggtgtgcccatgcctgacaagtactccttagagccagttgctgtagaactcaaatctctgctgggcaaggatgttctgttcttgaaggactgtgtaggcccagaagtggagaaagcctgtgccaacccagctgctgggtctgtcatcctgctggagaacctccgctttcatgtggaggaagaagggaagggaaaagatgcttctgggaacaaggttaaagccgagccagccaaaatagaagctttccgagcttcactttccaagctaggggatgtctatgtcaatgatgcttttggcactgctcacagagcccacagctccatggtaggagtcaatctgccacagaaggctggtgggtttttgatgaagaaggagctgaactactttgcaaaggccttggagagcccagagcgacccttcctggccatcctgggcggagctaaagttgcagacaagatccagctcatcaataatatgctggacaaagtcaatgagatgattattggtggtggaatggcttttaccttccttaaggtgctcaacaacatggagattggcacttctctgtttgatgaagagggagccaagattgtcaaagacctaatgtccaaagctgagaagaatggtgtgaagattaccttgcctgttgactttgtcactgctgacaagtttgatgagaatgccaagactggccaagccactgtggcttctggcatacctgctggctggatgggcttggactgtggtcctgaaagcagcaagaagtatgctgaggctgtcactcgggctaagcagattgtgtggaatggtcctgtgggggtatttgaatgggaagcttttgcccggggaaccaaagctctcatggatgaggtggtgaaagccacttctaggggctgcatcaccatcataggtggtggagacactgccacttgctgtgccaaatggaacacggaggataaagtcagccatgtgagcactgggggtggtgccagtttggagctcctggaagttcctgtgcacagcccctaagtcaacttagcattttctgcatctccacttggcattagctaaaaccttccatgtcaagattcagctagtggccaagagatgcagtgccaggaacccttaaacagttgcacagcatctcagctcatcttcactgcaccctggatttgcatacattcttcaagatcccatttgaattttttagtgactaaaccattgtgcattctagagtgcatatatttatattttgcctgttaaaaagaaagtgagcagtgttagcttagttctcttttgatgtaggttattatgattagctttgtcactgtttcactactcagcatggaaacaagatgaaattccatttgtaggtagtgagacaaaattgatgatccattaagtaaacaataaaagtgtccattgaaaccgtgatttttttttttttcctgtcatactttgttaggaagggtgagaatagaatcttgaggaacggatcagatgtctatattgctgaatgcaagaagtggggcagcagcagtggagagatgggacaattagataaatgtccattctttatcaagggcctactttatggcagacattgtgctagtgcttttattctaacttttatttttatcagttacacatgatcataatttaaaaagtcaaggcttataacaaaaaagccccagcccattcctcccattcaagattcccactccccagaggtgaccactttcaactcttgagtttttcaggtatatacctccatgtttctaagtaatatgcttatattgttcacttcttttttttttattttttaaagaaatctatttcataccatggaggaaggctctgttccacatatatttccacttcttcattctctcggtatagttttgtcacaattatagattagatcaaaagtctacataactaatacagctgagctatgtagtatgctatgattaaatttacttatgtaactttt

SEQ ID NO: 2213 - DNA, 2364 bp, Homo sapiens; identical to SEQ ID NO: 2212

SEQ ID NO: 2214 - DNA, 4058 bp, Homo sapiens
cagcggccgggaaggggcggtgcgggaggcggggtgtggggcggtagtgtgggccctgttcctgcccgcgcggtgttccgcattctgcaagcctccggagcgcacgtcggcagtcggctccctcgttgaccgaatcaccgacctctctccccagctgtatttccaaaatgtcgctttctaacaagctgacgctggacaagctggacgttaaagggaagcgggtcgttatgagagtcgacttcaatgttcctatgaagaacaaccagataacaaacaaccagaggattaaggctgctgtcccaagcatcaaattctgcttggacaatggagccaagtcggtagtccttatgagccacctaggccggcctgatggtgtgcccatgcctgacaagtactccttagagccagttgctgtagaactcaaatctctgctgggcaaggatgttctgttcttgaaggactgtgtaggcccagaagtggagaaagcctgtgccaacccagctgctgggtctgtcatcctgctggagaacctccgctttcatgtggaggaagaagggaagggaaaagatgcttctgggaacaaggttaaagccgagccagccaaaatagaagctttccgagcttcactttccaagctaggggatgtctatgtcaatgatgcttttggcactgctcacagagcccacagctccatggtaggagtcaatctgccacagaaggctggtgggtttttgatgaagaaggagctgaactactttgcaaaggccttggagagcccagagcgacccttcctggccatcctgggcggagctaaagttgcagacaagatccagctcatcaataatatgctggacaaagtcaatgagatgattattggtggtggaatggcttttaccttccttaaggtgctcaacaacatggagattggcacttctctgtttgatgaagagggagccaagattgtcaaagacctaatgtccaaagctgagaagaatggtgtgaagattaccttgcctgttgactttgtcactgctgacaagtttgatgagaatgccaagactggccaagccactgtggcttctggcatacctgctggctggatgggcttggactgtggtcctgaaagcagcaagaagtatgctgaggctgtcactcgggctaagcagattgtgtggaatggtcctgtgggggtatttgaatgggaagcttttgcccggggaaccaaagctctcatggatgaggtggtgaaagccacttctaggggctgcatcaccatcataggtggtggagacactgccacttgctgtgccaaatggaacacggaggataaagtcagccatgtgagcactgggggtggtgccagtttggagctcctggaaggtaaagtccttcctggggtggatgctctcagcaatatttagtactttcctgccttttagttcctgtgcacagcccctaagtcaacttagcattttctgcatctccacttggcattagctaaaaccttccatgtcaagattcagctagtggccaagagatgcagtgccaggaacccttaaacagttgcacagcatctcagctcatcttcactgcaccctggatttgcatacattcttcaagatcccatttgaattttttagtgactaaaccattgtgcattctagagtgcatatatttatattttgcctgttaaaaagaaagtgagcagtgttagcttagttctcttttgatgtaggttattatgattagctttgtcactgtttcactactcagcatggaaacaagatgaaattccatttgtaggtagtgagacaaaattgatgatccattaagtaaacaataaaagtgtccattgaaaccgtgatttttttttttttcctgtcatactttgttaggaagggtgagaatagaatcttgaggaacggatcagatgtctatattgctgaatgcaagaagtggggcagcagcagtggagagatgggacaattagataaatgtccattctttatcaagggcctactttatggcagacattgtgctagtgcttttattctaacttttatttttatcagttacacatgatcataatttaaaaagtcaaggcttataacaaaaaagccccagcccattcctcccattcaagattcccactccccagaggtgaccactttcaactcttgagtttttcaggtatatacctccatgtttctaagtaatatgcttatattgttcacttcttttttttttattttttaaagaaatctatttcataccatggaggaaggctctgttccacatatatttccacttcttcattctctcggtatagttttgtcacaattatagattagatcaaaagtctacataactaatacagctgagctatgtagtatgctatgattaaatttacttatgtaacttttattgtctttggcattaacagtgtttcaaaaaattttctgtgtatacccatcagtgattcattcccaaatcttctagaagcataagtgtctcaatatattaaaacatattgaataatccttgttagagttatccctgcaggagtccttagtgctcctttatccaatttgtacttgatgccctctaggcagggtgtacagctagctgttgctctggtatttcctataaccttcttggggatttcttttacctcctgtgttagactcctgttttctggattcccccttttccctctttcttggtctactttttgtagaacacaagactctactagcttcctgagaaagggtgcctgggaggcaaaatctctaagactttgtaagtctgaaaatgtctttattcgacccttatacttgattcctagtttggctatatatagaattttagcctgagtatcactttttgagactcgaagccactgtttcattgtcactattgagaatctaaatggccattcggattctttcatcatctttataattttaccttcctatttctttcctgtccttttaatggagttttgggagagagcagaggtaaacatgatttgaaaaagccatgtctgaccagaaattctgtgctggcaagatatgtatttcacctttagggacaaagaaataaacttttggacaggaccacagagctagtaagtaacagcagggattcaagtccaggtttgtctggttccagtggctgatgcttttccaatgtgcctccgtccctgacatgatgcttctaggctatagatgcttctagactctatccctgacatgatgcttctagactattttgtttaaccctggatagaatagcaaaagaaaattttggtggttgctctaaacaaaacagaaatttgaaagctcaagttttttcttcatttgtattttagttaatactgtacccatatttgtagttaattttaaattgtaccatgtttctgcatacctctatgggtactcaggaattctagtccaatttttgtgactttttcctactgattacctttcctccaacgttttaaaaattatttcaaatggaactgaaagaagcataaactcccataaacccagcacctagactctacaattgccaacattatctatccaacaatctctgactgtaccttttaagtactttctactggactgtttccaggatcacccctcatttatttgggttgttaacctaaagaatgaatgggggaatctccagtcataaacaacttgtcaattaggcaaatatttgagttccttctatgtgcttaaagacgtgatagagggaatataagagcatttatgttctgaaggaatttttaacctaaccaaagaagatagtagataacttgtgtgcatataagctagaacagtataaggggccgggcatggtggcttacgcctgtaatcccaggactttgggaggccaaggctggtctcgaactcctggcctcaagtgatcctcccgcctcggtctcccaaagtgctgggattacaggtgtgagccattgtaccctgccaataattgtgtatatgtacgggatataatgtgatgttctgatctatgtatagataaagattaaa

SEQ ID NO: 2215 - DNA, 1651 bp, Homo sapiens
gcctgggtcctagggaaggaagccatgctggggtaccaggactacaagactgccatgctgtcggacatcaaagccctcattctcaagcacgaggccttcgagagctacctggctgcggcacaccagcaccgcgtggagcagatcgcagcctttgcccaggagctcaacgagctggattactatgactcccacaatgtccacacccggtgccagaagatctgggaccagtgggacgccctcggctctctgaccaacagtcgcagggaagccctggagaaaacagagaagcagctggaggccatagaccatctgcacctggagtatgccaagcgcgtggcccccttcaacaactggatggagagcgccatggaggacctccaggacatgttcatcatctacaccatcgaggacactgagggcctgatctcagcccacgaccagttcaagtccaccctgccggacgctgacagggagcacgaggccatcctggccatccacaaggaggcccagaggatcgctgagcgcaaccacatcaagctgtcaggcagcaacccctacaccaccgtcaccccacagatcatcaactccaagtgggggaaggtgcagcagctggtgccaaaacgggaccacgccctcctggaggagcagagcaaccagcagtccaacaagcacctgcgctgccagttcgccagccaggccaacgtcgtggggccctggatccagaccaagatggaggagatcgggctcatctccactgagatgaacgggaccctggaggaccagctgagccacctgaagcagtgtgaaaacagcatcgtggactacaagcctaacctggacctgctggagcagcagcaccagctcatccaggaggccctcatcttcgacaacaagcacaccatggagcacatccgcgtgggcagggagcagctgctcaccaccattgccccaaccatcatcgaggtggagaaccagatcctcacccgcgacgtcaaaggcatcagccaggagcagatgcagcagttccgggcgtccttcaaccacttcgacaaggatcatggtggggtgctggggcctgaggggttcaaggcctgcctcatcagcctgggctatgacgtggagaacgaccggcagggtgaggccgagttcaaccgcatcatgagcctggtcgaccccaaccatagcggccttgtgaccttccaagccttcatcgacttcatgtcgcaggagaccaccgacacggacatggccgaccaggtcatcgcctccttcaaggtcctggcaagggacaagaacttcatcacagctgaggagctgcgagagagctgctccccgaccaggccgagtactctattgcccgcatggtgccctaccagggccctgacgccgtgcccggtgtcctcgactacaagtcttcctccacagccctgtatggcgagagcgacctgtgaggccccagagagacccggacccaacaccccctatggcctccaggaggggccggggcagccccacagtcccgttcctccactctgtatctatgcaaagcactctctgctgtcctcccgggtggctgggtgggcagggaggggctggggcaggctctctcctgtctctttttgggagttggccaggaggttcccccgaccag

SEQ ID NO: 2216 - DNA, 1931 bp, Homo sapiens
actggttccagttcactcggcagcggcgccgggcggagggggagagcgcgggccgcgcgggcgggaagcgaagaggcgggcgggccagcgaggagcgcggagagaaaaggcgcgagcggccaggagggctcaggccgagacaccttgcagctgccgccgccgccaccgagccgccgctgtgctcactgatccgcctccagggccaccgccatgtcgagccgcggtgggaagaagaagtccaccaagacgtccaggtctgccaaagcaggagtcatctttcccgtggggcggatgctgcggtacatcaagaaaggccaccccaagtacaggattggagtgggggcacccgtgtacatggccgccgtcctggaatacctgacagcggagattctggagctggctggcaatgcagcgagagacaacaagaagggacgggtcacaccccggcacatcctgctggctgtggccaatgatgaagagctgaatcagctgctaaaaggagtcaccatagccagtgggggtgtgttacccaacatccaccccgagttgctagcgaagaagcggggatccaaaggaaagttggaagccatcatcacaccacccccagccaaaaaggccaagtctccatcccagaagaagcctgtatctaaaaaagcaggaggcaagaaaggggcccggaaatccaagaagaagcagggtgaagtcagtaaggcagccagcgccgacagcacaaccgagggcacacctgccgacggcttcacagtcctctccaccaagagcctcttccttggccagaagttgcaagttgtacaggctgacattgcctcgatcgacagtgatgctgtcgttcacccgacaaacactgacttctacatcggtggtgaagtaggaaacacgctggagaagaaaggtggcaaggagtttgtggaagctgtcctggaactccggaaaaagaacgggcccttggaagtagctggagctgctgtcagcgcaggccatggcctgcctgccaagtttgtgatccactgtaatagtccagtttggggtgcagacaagtgtgaagaacttctggaaaagacagtgaaaaactgcttggccctggctgatgataagaagctgaaatccattgcatttccatccatcggcagcggcaggaacggttttccaaagcagacagcagctcagctgattctgaaggccatctccagttacttcgtgtctacaatgtcctcttccatcaaaacggtgtacttcgtgctttttgacagcgagagtataggcatctatgtgcaggaaatggccaagctggacgccaactaggctgagcaatgacagaaccagctgcaccatgtaccccaccttcagtttaaaagaaaaaaaaaatccccttcactcctactgggaggtgggacccctttcattttcagttttgctcatctagggaaaataaggctttggtttccagtttaattgtttttgaccttctaaaatgtttttatgttagcactgatagttggcattactgttgttaagcactgtgttccagaccgtgtctgacttagtgtaacctaggagattttatagttttattttaatgaaaccctgattgacgcacagcagtggggagaacagcgtcttttacctgtcaccgaagccaggaagccccgtttgtaagcgtgtgttgtggtgctttattgtacatcctccagtggcgttctttttactctaatgttcttttggtttcccccctcagaagaatcatgaatttgcaacagacctaatttttggttactttttgtcttattgatggatttgaaaatgaaagatttaataaggcaaagcagaatctgttgtccttaattatatttgcaatttggaatttgtgtgagttgatttagtaaaatgttaaaccgttaaaaaaaaaaaaaaaa

SEQ ID NO: 2217 - DNA, 779 bp, Homo sapiens
cccgctggcccaatggcagcgtcctacagtgtagcctccgcctcccgattgactggcctgcttggcaaggcaagtagcggcggcgcttcaagatgcgctgcctgaccacgcctatgctgctgcgggccctggcccaggctgcacgtgcaggacctcctggtggccggagcctccacagcagtgcagtggcagccacctacaagtatgtgaacatgcaggatcccgagatggacatgaagtcagtgactgaccgggcagcccgcaccctgctgtggactgagctcttccgaggcctgggcatgaccctgagctacctgttccgggaaccggccaccatcaactacccgttcgagaagggcccgctgagccctcgcttccgtggggagcatgcgctgcgccggtacccatccggggaggagcgttgcattgcctgcaagctctgcgaggccatctgccccgcccaggccatcaccatcgaggctgagccaagagctgatggcagccgccggaccacccgctatgacatcgacatgaccaagtgcatctactgcggcttctgccaggaggcctgtcccgtggatgccatcgtcgagggccccaactttgagttctccacggagacccatgaggagctgctgtacaacaaggagaagttgctcaacaacggggacaagtgggaggccgagatcgccgccaacatccaggctgactacttgtatcggtgacgccccaccggcccgcagcccctgctgcccaataaaaccactccgaccccacgg

SEQ ID NO: 2218 - DNA, 1956 bp, Homo sapiens
gaagtagggcgtgtggcgtcacttccggcttccttcagtccgctggtcccgagcacgagctgtgaggggattcacttgtgtgcggaactcctcggaaccatggcgtccctttcccttgcacctgttaacatctttaaggcaggagctgatgaagagagagcagagacagctcgtctgacttcttttattggtgccatcgccattggagacttggtaaagagcaccttgggacccaaaggcatggacaaaattcttctaagcagtggacgagatgcctctcttatggtaaccaatgatggtgccactattctaaaaaacattggtgttgacaatccagcagctaaagttttagttgatatgtcaagggttcaagatgatgaagttggtgatggcactacctctgttaccgttttagcagcagaattattaagggaagcagaatctttaattgcaaaaaagattcatccacagaccatcatagcgggttggagagaagccacgaaggctgcaagagaggcgctgttgagttctgcagttgatcatggttccgatgaagttaaattccgtcaagatttaatgaatattgcgggcacaacattatcctcaaaacttcttactcatcacaaagaccactttacaaagttagctgtagaagcagttctcagactgaaaggctctggcaacctggaggcaattcatattatcaagaagctaggaggaagtttggcagattcctatttagatgaaggcttcctgttggataaaaaaattggagtaaatcaaccaaaacgaattgaaaatgctaaaattcttattgcaaatactggtatggatacagacaaaataaagatatttggttcccgggtaagagttgactctacagcaaaggttgcagaaatagaacatgcggaaaaggaaaaaatgaaggagaaagttgaacgtattcttaagcatggaataaattgctttattaacaggcaattaatttataattatcctgaacagctctttggtgctgctggtgtcatggctattgagcatgcagattttgcaggtgtggaacgcctagctcttgtcacaggtggtgaaattgcctctacctttgatcacccagaactggtgaagcttggaagttgcaaacttatcgaggaagtcatgattggagaagacaaactcattcacttttctggggttgcccttggtgaggcttgtaccattgttttgcgtggtgccactcaacaaattttagatgaagcagaaagatcattgcatgatgctctttgtgttcttgcgcaaactgtaaaggactctagaacagtttatggaggaggctgttctgagatgttgatggctcatgctgtgacacagcttgccaatagaacaccaggcaaagaagctgttgcaatggagtcttatgctaaagcactgagaatgttgccaaccatcatagctgacaatgcaggctatgacagtgcagacctggtggcacagctcagggctgctcacagtgaaggcaataccactgctggattggatatgagggaaggcaccattggagatatggctatcctgggtataacagaaagttttcaagtgaagcgacaggttcttctgagtgcagctgaagcagcagaggtgattctgcgtgtggacaacatcatcaaagcggcacccaggaaacgtgtccctgatcaccacccctgttaagcattcccacgtgctgtcgatctttggaccagtttctagcaaagttgtgtttgaaagatactctattaaagaagactgtggaatctgtttatcggtgcccattatatccttaagtttggatatttagctgaccttcgctttaacataggtctaatttatttgccgtgtcattttccatacaaatcagttgatttaaaaaagttcatttctcatactgtgcattaaaataaaaatttgaacaattacttg

SEQ ID NO: 2219 - DNA, 1935 bp, Homo sapiens
ctggtcccgagcacgagctgtgaggggattcacttgtgtgcggaactcctcggaaccatggcgtccctttcccttgcacctgttaacatctttaaggcaggagctgatgaagagagagcagagacagctcgtctgacttcttttattggtgccatcgccattggagacttggtaaagagcaccttgggacccaaaggcatggacaaaattcttctaagcagtggacgagatgcctctcttatggtaaccaatgatggtgccactattctaaaaaacattggtgttgacaatccagcagctaaagttttagttgatatgtcaagggttcaagatgatgaagttggtgatggcactacctctgttaccgttttagcagcagaattattaagggaagcagaatctttaattgcaaaaaagattcatccacagaccatcatagcgggttggagagaagccacgaaggctgcaagagaggcgctgttgagttctgcagttgatcatggttccgatgaagttaaattccgtcaagatttaatgaatattgcgggcacaacattatcctcaaaacttcttactcatcacaaagaccactttacaaagttagctgtagaagcagttctcagactgaaaggctctggcaacctggaggcaattcatattatcaagaagctaggaggaagtttggcagattcctatttagatgaaggcttcctgttggataaaaaaattggagtaaatcaaccaaaacgaattgaaaatgctaaaattcttattgcaaatactggtatggatacagacaaaataaagatatttggttcccgggtaagagttgactctacagcaaaggttgcagaaatagaacatgcggaaaaggaaaaaatgaaggagaaagttgaacgtattcttaagcatggaataaattgctttattaacaggcaattaatttataattatcctgaacagctctttggtgctgctggtgtcatggctattgagcatgcagattttgcaggtgtggaacgcctagctcttgtcacaggtggtgaaattgcctctacctttgatcacccagaactggtgaagcttggaagttgcaaacttatcgaggaagtcatgattggagaagacaaactcattcacttttctggggttgcccttggtgaggcttgtaccattgttttgcgtggtgccactcaacaaattttagatgaagcagaaagatcattgcatgatgctctttgtgttcttgcgcaaactgtaaaggactctagaacagtttatggaggaggctgttctgagatgttgatggctcatgctgtgacacagcttgccaatagaacaccaggcaaagaagctgttgcaatggagtcttatgctaaagcactgagaatgttgccaaccatcatagctgacaatgcaggctatgacagtgcagacctggtggcacagctcagggctgctcacagtgaaggcaataccactgctggattggatatgagggaaggcaccattggagatatggctatcctgggtataacagaaagttttcaagtgaagcgacaggttcttctgagtgcagctgaagcagcagaggtgattctgcgtgtggacaacatcatcaaagcggcacccaggaaacgtgtccctgatcaccacccctgttaagcattcccacgtgctgtcgatctttggaccagtttctagcaaagttgtgtttgaaagatactctattaaagaagactgtggaatctgtttatcggtgcccattatatccttaagtttggatatttagctgaccttcgctttaacataggtctaatttatttgccgtgtcattttccatacaaatcagttgatttaaaggagttcatttcgcatactgggcattaaaataaaaatttgaacaatgaaaggaaaaaaaggagaaaaaaaaaa

SEQ ID NO: 2220 - DNA, 1956 bp, Homo sapiens; identical to SEQ ID NO: 2218

SEQ ID NO: 2221 - DNA, 2161 bp, Homo sapiens
ggccggctgcagactctcaccgcagcggccaggaacgccagccgttcacgcgttcggtcctccttggctgactcaccgccctggccgccgcaccatggacgcccccaggcaggtggtcaactttgggcctggtcccgccaagctgccgcactcagtgttgttagagatacaaaaggaattattagactacaaaggagttggcattagtgttcttgaaatgagtcacaggtcatcagattttgccaagattattaacaatacagagaatcttgtgcgggaattgctagctgttccagacaactataaggtgatttttctgcaaggaggtgggtgcggccagttcagtgctgtccccttaaacctcattggcttgaaagcaggaaggtgtgcggactatgtggtgacaggagcttggtcagctaaggccgcagaagaagccaagaagtttgggactataaatatcgttcaccctaaacttgggagttatacaaaaattccagatccaagcacctggaacctcaacccagatgcctcctacgtgtattattgcgcaaatgagacggtgcatggtgtggagtttgactttatacccgatgtcaagggagcagtactggtttgtgacatgtcctcaaacttcctgtccaagccagtggatgtttccaagtttggtgtgatttttgctggtgcccagaagaatgttggctctgctggggtcaccgtggtgattgtccgtgatgacctgctggggtttgccctccgagagtgcccctcggtcctggaatacaaggtgcaggctggaaacagctccttgtacaacacgcctccatgtttcagcatctacgtcatgggcttggttctggagtggattaaaaacaatggaggtgccgcggccatggagaagcttagctccatcaaatctcaaacaatttatgagattattgataattctcaaggattctacgtttgtccagtggagccccaaaatagaagcaagatgaatattccattccgcattggcaatgccaaaggagatgatgctttagaaaaaagatttcttgataaagctcttgaactcaatatgttgtccttgaaagggcataggtctgtgggaggcatccgggcctctctgtataatgctgtcacaattgaagacgttcagaagctggccgccttcatgaaaaaatttttggagatgcatcagctatgaacacatcctaaccaggatatactctgttcttgaacaacatacaaagtttaaagtaacttggggatggctacaaaaagttaacacagtatttttctcaaatgaacatgtttattgcagattcttcttttttgaaagaacaacagcaaaacatccacaactctgtaaagctggtgggacctaatgtcaccttaattctgacttgaactggaagcattttaagaaatcttgttgcttttctaacaaattcccgcgtattttgcctttgctgctactttttctagttagatttcaaacttgcctgtggacttaataatgcaagttgcgattaattatttctggagtcatgggaacacacagcacagagggtaggggggccctctaggtgctgaatctacacatctgtggggtctcctgggttcagcggctgttgattcaaggtcaacattgaccattggaggagtggtttaagagtgccaggcgaagggcaaactgtagatcgatctttatgctgttattacaggagaagtgacatactttatatatacatttatatttctaataatacagttatcactgatatatgtagacacttttagaatttattaaatccttgaccttgtgcattatagcattccattagcaagagttgtaccccctccccagtcttcgccttcctctttttaagctgttttatgaaaaagacctagaagttcttgattcatttttaccattctttccataggtagaagagaaagttgattggttggttgtttttcaattatgccattaaactaaacatttctgttaaattaccctatcctttgttctctactgttttctttgtaatgtatgactacgagagtgatactttgctgaaaagtctttcccctattgtttatctattgtcagtattttatgttgaatatgtaaagaacattaaagtcctaaaacatc

SEQ ID NO: 2222 - DNA, 2023 bp, Homo sapiens
ggccggctgcagactctcaccgcagcggccaggaacgccagccgttcacgcgttcggtcctccttggctgactcaccgccctggccgccgcaccatggacgcccccaggcaggtggtcaactttgggcctggtcccgccaagctgccgcactcagtgttgttagagatacaaaaggaattattagactacaaaggagttggcattagtgttcttgaaatgagtcacaggtcatcagattttgccaagattattaacaatacagagaatcttgtgcgggaattgctagctgttccagacaactataaggtgatttttctgcaaggaggtgggtgcggccagttcagtgctgtccccttaaacctcattggcttgaaagcaggaaggtgtgcggactatgtggtgacaggagcttggtcagctaaggccgcagaagaagccaagaagtttgggactataaatatcgttcaccctaaacttgggagttatacaaaaattccagatccaagcacctggaacctcaacccagatgcctcctacgtgtattattgcgcaaatgagacggtgcatggtgtggagtttgactttatacccgatgtcaagggagcagtactggtttgtgacatgtcctcaaacttcctgtccaagccagtggatgtttccaagtttggtgtgatttttgctggtgcccagaagaatgttggctctgctggggtcaccgtggtgattgtccgtgatgacctgctggggtttgccctccgagagtgcccctcggtcctggaatacaaggtgcaggctggaaacagctccttgtacaacacgcctccatgtttcagcatctacgtcatgggcttggttctggagtggattaaaaacaatggaggtgccgcggccatggagaagcttagctccatcaaatctcaaacaatttatgagattattgataattctcaaggattctacgtgtctgtgggaggcatccgggcctctctgtataatgctgtcacaattgaagacgttcagaagctggccgccttcatgaaaaaatttttggagatgcatcagctatgaacacatcctaaccaggatatactctgttcttgaacaacatacaaagtttaaagtaacttggggatggctacaaaaagttaacacagtatttttctcaaatgaacatgtttattgcagattcttcttttttgaaagaacaacagcaaaacatccacaactctgtaaagctggtgggacctaatgtcaccttaattctgacttgaactggaagcattttaagaaatcttgttgcttttctaacaaattcccgcgtattttgcctttgctgctactttttctagttagatttcaaacttgcctgtggacttaataatgcaagttgcgattaattatttctggagtcatgggaacacacagcacagagggtaggggggccctctaggtgctgaatctacacatctgtggggtctcctgggttcagcggctgttgattcaaggtcaacattgaccattggaggagtggtttaagagtgccaggcgaagggcaaactgtagatcgatctttatgctgttattacaggagaagtgacatactttatatatacatttatatttctaataatacagttatcactgatatatgtagacacttttagaatttattaaatccttgaccttgtgcattatagcattccattagcaagagttgtaccccctccccagtcttcgccttcctctttttaagctgttttatgaaaaagacctagaagttcttgattcatttttaccattctttccataggtagaagagaaagttgattggttggttgtttttcaattatgccattaaactaaacatttctgttaaattaccctatcctttgttctctactgttttctttgtaatgtatgactacgagagtgatactttgctgaaaagtctttcccctattgtttatctattgtcagtattttatgttgaatatgtaaagaacattaaagtcctaaaacatc

SEQ ID NO: 2223 - DNA, 2083 bp, Homo sapiens
ggccaggaacgccagccgttcacgcgttcggtcctccttggctgactcaccgccctggccgccgcaccatggacgcccccaggcaggtggtcaactttgggcctggtcccgccaagctgccgcactcagtgttgttagagatacaaaaggaattattagactacaaaggagttggcattagtgttcttgaaatgagtcacaggtcatcagattttgccaagattattaacaatacagagaatcttgtgcgggaattgctagctgttccagacaactataaggtgatttttctgcaaggaggtgggtgcggccagttcagtgctgtccccttaaacctcattggcttgaaagcaggaaggtgtgctgactatgtggtgacaggagcttggtcagctaaggccgcagaagaagccaagaagtttgggactataaatatcgttcaccctaaacttgggagttatacaaaaattccagatccaagcacctggaacctcaacccagatgcctcctacgtgtattattgcgcaaatgagacggtgcatggtgtggagtttgactttatacccgatgtcaagggagcagtactggtttgtgacatgtcctcaaacttcctgtccaagccagtggatgtttccaagtttggtgtgatttttgctggtgcccagaagaatgttggctctgctggggtcaccgtggtgattgtccgtgatgacctgctggggtttgccctccgagagtgcccctcggtcctggaatacaaggtgcaggctggaaacagctccttgtacaacacgcctccatgtttcagcatctacgtcatgggcttggttctggagtggattaaaaacaatggaggtgccgcggccatggagaagcttagctccatcaaatctcaaacaatttatgagattattgataattctcaaggattctacgtgtctgtgggaggcatccgggcctctctgtataatgctgtcacaattgaagacgttcagaagctggccgccttcatgaaaaaatttttggagatgcatcagctatgaacacatcctaaccaggatatactctgttcttgaacaacatacaaagtttaaagtaacttggggatggctacaaaaagttaacacagtatttttctcaaatgaacatgtttattgcagattcttcttttttgaaagaacaacagcaaaacatccacaactctgtaaagctggtgggacctaatgtcaccttaattctgacttgaactggaagcattttaagaaatcttgttgcttttctaacaaattcccgcgtattttgcctttgctgctactttttctagttagatttcaaacttgcctgtggacttaataatgcaagttgcgattaattatttctggagtcatgggaacacacagcacagagggtaggggggccctctaggtgctgaatctacacatctgtggggtctcctgggttcagcggctgttgattcaaggtcaacattgaccattggaggagtggtttaagagtgccaggcgaagggcaaactgtagatcgatctttatgctgttattacaggagaagtgacatactttatatatgtttatattagcaaggtctgtttttaataccatatactttatatttctatacatttatatttctaataatacagttatcactgatatatgtagacacttttagaatttattaaatccttgaccttgtgcattatagcattccattagcaagagttgtaccccctccccagtcttcgccttcctctttttaagctgttttatgaaaaagacctagaagttcttgattcatttttaccattctttccataggtagaagagaaagttgattggttggttgtttttcaattatgccattaaactaaacatttctgttaaattaccctatcctttgttctctactgttttctttgtaatgtatgactacgagagtgatactttgctgaaaagtctttcccctattgtttatctattgtcagtattttatgttgaatatgtaaagaacattaaagtcctaaaacatctaaaaaaaaaaaaaaaaaaaaaaaaaaaaaaaaaaa

SEQ ID NO: 2224 - DNA, 2221 bp, Homo sapiens
ggccaggaacgccagccgttcacgcgttcggtcctccttggctgactcaccgccctggccgccgcaccatggacgcccccaggcaggtggtcaactttgggcctggtcccgccaagctgccgcactcagtgttgttagagatacaaaaggaattattagactacaaaggagttggcattagtgttcttgaaatgagtcacaggtcatcagattttgccaagattattaacaatacagagaatcttgtgcgggaattgctagctgttccagacaactataaggtgatttttctgcaaggaggtgggtgcggccagttcagtgctgtccccttaaacctcattggcttgaaagcaggaaggtgtgctgactatgtggtgacaggagcttggtcagctaaggccgcagaagaagccaagaagtttgggactataaatatcgttcaccctaaacttgggagttatacaaaaattccagatccaagcacctggaacctcaacccagatgcctcctacgtgtattattgcgcaaatgagacggtgcatggtgtggagtttgactttatacccgatgtcaagggagcagtactggtttgtgacatgtcctcaaacttcctgtccaagccagtggatgtttccaagtttggtgtgatttttgctggtgcccagaagaatgttggctctgctggggtcaccgtggtgattgtccgtgatgacctgctggggtttgccctccgagagtgcccctcggtcctggaatacaaggtgcaggctggaaacagctccttgtacaacacgcctccatgtttcagcatctacgtcatgggcttggttctggagtggattaaaaacaatggaggtgccgcggccatggagaagcttagctccatcaaatctcaaacaatttatgagattattgataattctcaaggattctacgtttgtccagtggagccccaaaatagaagcaagatgaatattccattccgcattggcaatgccaaaggagatgatgctttagaaaaaagatttcttgataaagctcttgaactcaatatgttgtccttgaaagggcataggtctgtgggaggcatccgggcctctctgtataatgctgtcacaattgaagacgttcagaagctggccgccttcatgaaaaaatttttggagatgcatcagctatgaacacatcctaaccaggatatactctgttcttgaacaacatacaaagtttaaagtaacttggggatggctacaaaaagttaacacagtatttttctcaaatgaacatgtttattgcagattcttcttttttgaaagaacaacagcaaaacatccacaactctgtaaagctggtgggacctaatgtcaccttaattctgacttgaactggaagcattttaagaaatcttgttgcttttctaacaaattcccgcgtattttgcctttgctgctactttttctagttagatttcaaacttgcctgtggacttaataatgcaagttgcgattaattatttctggagtcatgggaacacacagcacagagggtaggggggccctctaggtgctgaatctacacatctgtggggtctcctgggttcagcggctgttgattcaaggtcaacattgaccattggaggagtggtttaagagtgccaggcgaagggcaaactgtagatcgatctttatgctgttattacaggagaagtgacatactttatatatgtttatattagcaaggtctgtttttaataccatatactttatatttctatacatttatatttctaataatacagttatcactgatatatgtagacacttttagaatttattaaatccttgaccttgtgcattatagcattccattagcaagagttgtaccccctccccagtcttcgccttcctctttttaagctgttttatgaaaaagacctagaagttcttgattcatttttaccattctttccataggtagaagagaaagttgattggttggttgtttttcaattatgccattaaactaaacatttctgttaaattaccctatcctttgttctctactgttttctttgtaatgtatgactacgagagtgatactttgctgaaaagtctttcccctattgtttatctattgtcagtattttatgttgaatatgtaaagaacattaaagtcctaaaacatctaaaaaaaaaaaaaaaaaaaaaaaaaaaaaaaaaaa

SEQ ID NO: 2225 - DNA, 2074 bp, Homo sapiens
ggccggctgcagactctcaccgcagcggccaggaacgccagccgttcacgcgttcggtcctccttggctgactcaccgccctggccgccgcaccatggacgcccccaggcaggtggtcaactttgggcctggtcccgccaagctgccgcactcagtgttgttagagatacaaaaggaattattagactacaaaggagttggcattagtgttcttgaaatgagtcacaggtcatcagattttgccaagattattaacaatacagagaatcttgtgcgggaattgctagctgttccagacaactataaggtgatttttctgcaaggaggtgggtgcggccagttcagtgctgtccccttaaacctcattggcttgaaagcaggaaggtgtgcggactatgtggtgacaggagcttggtcagctaaggccgcagaagaagccaagaagtttgggactataaatatcgttcaccctaaacttgggagttatacaaaaattccagatccaagcacctggaacctcaacccagatgcctcctacgtgtattattgcgcaaatgagacggtgcatggtgtggagtttgactttatacccgatgtcaagggagcagtactggtttgtgacatgtcctcaaacttcctgtccaagccagtggatgtttccaagtttggtgtgatttttgctggtgcccagaagaatgttggctctgctggggtcaccgtggtgattgtccgtgatgacctgctggggtttgccctccgagagtgcccctcggtcctggaatacaaggtgcaggctggaaacagctccttgtacaacacgcctccatgtttcagcatctacgtcatgggcttggttctggagtggattaaaaacaatggaggtgccgcggccatggagaagcttagctccatcaaatctcaaacaatttatgagattattgataattctcaaggattctacgtgtctgtgggaggcatccgggcctctctgtataatgctgtcacaattgaagacgttcagaagctggccgccttcatgaaaaaatttttggagatgcatcagctatgaacacatcctaaccaggatatactctgttcttgaacaacatacaaagtttaaagtaacttggggatggctacaaaaagttaacacagtatttttctcaaatgaacatgtttattgcagattcttcttttttgaaagaacaacagcaaaacatccacaactctgtaaagctggtgggacctaatgtcaccttaattctgacttgaactggaagcattttaagaaatcttgttgcttttctaacaaattcccgcgtattttgcctttgctgctactttttctagttagatttcaaacttgcctgtggacttaataatgcaagttgcgattaattatttctggagtcatgggaacacacagcacagagggtaggggggccctctaggtgctgaatctacacatctgtggggtctcctgggttcagcggctgttgattcaaggtcaacattgaccattggaggagtggtttaagagtgccaggcgaagggcaaactgtagatcgatctttatgctgttattacaggagaagtgacatactttatatatgtttatattagcaaggtctgtttttaataccatatactttatatttctatacatttatatttctaataatacagttatcactgatatatgtagacacttttagaatttattaaatccttgaccttgtgcattatagcattccattagcaagagttgtaccccctccccagtcttcgccttcctctttttaagctgttttatgaaaaagacctagaagttcttgattcatttttaccattctttccataggtagaagagaaagttgattggttggttgtttttcaattatgccattaaactaaacatttctgttaaattaccctatcctttgttctctactgttttctttgtaatgtatgactacgagagtgatactttgctgaaaagtctttcccctattgtttatctattgtcagtattttatgttgaatatgtaaagaacattaaagtcctaaaacatct

SEQ ID NO: 2226 - DNA, 2083 bp, Homo sapiens
ggccggctgcagactctcaccgcagcggccaggaacgccagccgttcacgcgttcggtcctccttggctgactcaccgccctggccgccgcaccatggacgcccccaggcaggtggtcaactttgggcctggtcccgccaagctgccgcactcagtgttgttagagatacaaaaggaattattagactacaaaggagttggcattagtgttcttgaaatgagtcacaggtcatcagattttgccaagattattaacaatacagagaatcttgtgcgggaattgctagctgttccagacaactataaggtgatttttctgcaaggaggtgggtgcggccagttcagtgctgtccccttaaacctcattggcttgaaagcaggaaggtgtgcggactatgtggtgacaggagcttggtcagctaaggccgcagaagaagccaagaagtttgggactataaatatcgttcaccctaaacttgggagttatacaaaaattccagatccaagcacctggaacctcaacccagatgcctcctacgtgtattattgcgcaaatgagacggtgcatggtgtggagtttgactttatacccgatgtcaagggagcagtactggtttgtgacatgtcctcaaacttcctgtccaagccagtggatgtttccaaggtagatttggtgtgatttttgctggtgcccagaagaatgttggctctgctggggtcaccgtggtgattgtccgtgatgacctgctggggtttgccctccgagagtgcccctcggtcctggaatacaaggtgcaggctggaaacagctccttgtacaacacgcctccatgtttcagcatctacgtcatgggcttggttctggagtggattaaaaacaatggaggtgccgcggccatggagaagcttagctccatcaaatctcaaacaatttatgagattattgataattctcaaggattctacgtgtaagtctgtgggaggcatccgggcctctctgtataatgctgtcacaattgaagacgttcagaagctggccgccttcatgaaaaaatttttggagatgcatcagctatgaacacatcctaaccaggatatactctgttcttgaacaacatacaaagtttaaagtaacttggggatggctacaaaaagttaacacagtatttttctcaaatgaacatgtttattgcagattcttcttttttgaaagaacaacagcaaaacatccacaactctgtaaagctggtgggacctaatgtcaccttaattctgacttgaactggaagcattttaagaaatcttgttgcttttctaacaaattcccgcgtattttgcctttgctgctactttttctagttagatttcaaacttgcctgtggacttaataatgcaagttgcgattaattatttctggagtcatgggaacacacagcacagagggtaggggggccctctaggtgctgaatctacacatctgtggggtctcctgggttcagcggctgttgattcaaggtcaacattgaccattggaggagtggtttaagagtgccaggcgaagggcaaactgtagatcgatctttatgctgttattacaggagaagtgacatactttatatatgtttatattagcaaggtctgtttttaataccatatactttatatttctatacatttatatttctaataatacagttatcactgatatatgtagacacttttagaatttattaaatccttgaccttgtgcattatagcattccattagcaagagttgtaccccctccccagtcttcgccttcctctttttaagctgttttatgaaaaagacctagaagttcttgattcatttttaccattctttccataggtagaagagaaagttgattggttggttgtttttcaattatgccattaaactaaacatttctgttaaattaccctatcctttgttctctactgttttctttgtaatgtatgactacgagagtgatactttgctgaaaagtctttcccctattgtttatctattgtcagtattttatgttgaatatgtaaagaacattaaagtcctaaaacatct

SEQ ID NO: 2227 - DNA, 2161 bp, Homo sapiens; identical to SEQ ID NO: 2221

SEQ ID NO: 2228 - protein, 11 aa, Homo sapiens
IVNETLYENTK

SEQ ID NO: 2229 - protein, 12 aa, Homo sapiens
CNEPAVWSQLAK

SEQ ID NO: 2230 - protein, 12 aa, Homo sapiens
AFSTLLVNVSGK

SEQ ID NO: 2231 - protein, 18 aa, Homo sapiens
KFLDGNELTLADCNLLPK

SEQ ID NO: 2232 - protein, 15 aa, Homo sapiens
TVIRPFYLTNSSGVD

SEQ ID NO: 2233 - protein, 13 aa, Homo sapiens
CHIDLSGIVEEVK

SEQ ID NO: 2234 - protein, 19 aa, Homo sapiens
AAPLDSIHSLAAYYIDCIR

SEQ ID NO: 2235 - protein, 18 aa, Homo sapiens
QKNSSDIVQIAPQSLILK

SEQ ID NO: 2236 - protein, 10 aa, Homo sapiens
LDFVCSFLQK

SEQ ID NO: 2237 - protein, 9 aa, Homo sapiens
ESNCYDPER

SEQ ID NO: 2238 - protein, 15 aa, Homo sapiens
SVLDAAQIVGLNCLR

SEQ ID NO: 2239 - protein, 20 aa, Homo sapiens
DQELYFFHELSPGSCFFLPK

SEQ ID NO: 2240 - protein, 14 aa, Homo sapiens
KNILEESLCELVAK

SEQ ID NO: 2241 - protein, 23 aa, Homo sapiens
IIEGEPNLKVPGNVTAVLGETLK

SEQ ID NO: 2242 - protein, 17 aa, Homo sapiens
AAVEEGIVLGGGCALLR

SEQ ID NO: 2243 - protein, 24 aa, Homo sapiens
TTVTGDKDSVNLTCSTNDTGISIR

SEQ ID NO: 2244 - protein, 21 aa, Homo sapiens
CESAPGCGVWQRPVIDNPNYK

SEQ ID NO: 2245 - protein, 12 aa, Homo sapiens
AVLVNNITTGER

SEQ ID NO: 2246 - protein, 15 aa, Homo sapiens
ICDQWDALGSLTHSR

SEQ ID NO: 2247 - protein, 8 aa, Homo sapiens
CKPPPDIR

SEQ ID NO: 2248 - protein, 13 aa, Homo sapiens
LCLISTFLEDGIR

SEQ ID NO: 2249 - protein, 13 aa, Homo sapiens
ALGFENATQALGR

SEQ ID NO: 2250 - protein, 29 aa, Homo sapiens
SGTIFDNFLITNDEAYAEEFGNETWGVTK

SEQ ID NO: 2251 - protein, 19 aa, Homo sapiens
FVPYLIAGIQHSCQDIGAK

SEQ ID NO: 2252 - protein, 10 aa, Homo sapiens
WACLVAGGSK

SEQ ID NO: 2253 - protein, 32 aa, Homo sapiens
SQGLNLHTLLYLGGVEPSVPLSPATNMSAHFR

SEQ ID NO: 2254 - protein, 10 aa, Homo sapiens
GPTNNTCVVR

SEQ ID NO: 2255 - protein, 23 aa, Homo sapiens
HNNDTQHIWESDSNEFSVIADPR

SEQ ID NO: 2256 - protein, 16 aa, Homo sapiens
FGWDCHGLPVEYEIDK

SEQ ID NO: 2257 - protein, 16 aa, Homo sapiens
GLPSLTSVSWNISVPR

SEQ ID NO: 2258 - protein, 29 aa, Homo sapiens
TAGYGINILGMDPLSTPFDNEFYNGLCNR

SEQ ID NO: 2259 - protein, 16 aa, Homo sapiens
LQLSNGNMTLTLLSVK

SEQ ID NO: 2260 - protein, 19 aa, Homo sapiens
VGNVTAKDPEGLDISYSLR

SEQ ID NO: 2261 - protein, 23 aa, Homo sapiens
FQPSFLGMESCGIHETTFNSIMK

SEQ ID NO: 2262 - protein, 13 aa, Homo sapiens
FWLPHNVTWADLK

SEQ ID NO: 2263 - protein, 14 aa, Homo sapiens
YSNSALGHVNCTIK

SEQ ID NO: 2264 - protein, 10 aa, Homo sapiens
CVEDPETGLR

SEQ ID NO: 2265 - protein, 9 aa, Homo sapiens
ADGVTVTCK

SEQ ID NO: 2266 - protein, 11 aa, Homo sapiens
NAVWALSNLCR

SEQ ID NO: 2267 - protein, 28 aa, Homo sapiens
LLLSSETPIEGKNMSFVNDLTVTQDGRK

SEQ ID NO: 2268 - protein, 24 aa, Homo sapiens
GDLENAFLNLVQCIQNKPLYFADR

SEQ ID NO: 2269 - protein, 24 aa, Homo sapiens
LFDDWMASNGTQSLPTDVMTTVFK

SEQ ID NO: 2270 - protein, 21 aa, Homo sapiens
FTFTSHTPGEHQICLHSNSTK

SEQ ID NO: 2271 - protein, 21 aa, Homo sapiens
IVVNVSDTNDHAPWFTASSYK

SEQ ID NO: 2272 - protein, 22 aa, Homo sapiens
SLTQGSLIVGDLAPVNGTSQGK

SEQ ID NO: 2273 - protein, 19 aa, Homo sapiens
KPVTDCVISVPSFFTDAER

SEQ ID NO: 2274 - protein, 12 aa, Homo sapiens
KGCPPDDIENPR

SEQ ID NO: 2275 - protein, 10 aa, Homo sapiens
GSLSYLNVTR

SEQ ID NO: 2276 - protein, 20 aa, Homo sapiens
GNVNGTFIIHPDSGNLTVAR

SEQ ID NO: 2277 - protein, 11 aa, Homo sapiens
CQSLTEDLEFR

SEQ ID NO: 2278 - protein, 11 aa, Homo sapiens
CDENILWLDYK

SEQ ID NO: 2279 - protein, 11 aa, Homo sapiens
LLDIACWIHHK

SEQ ID NO: 2280 - protein, 14 aa, Homo sapiens
SINVTGQGFSLIQR

SEQ ID NO: 2281 - protein, 11 aa, Homo sapiens
SFYGSTLFLCR

SEQ ID NO: 2282 - protein, 9 aa, Homo sapiens
LHIVQVVCK

SEQ ID NO: 2283 - protein, 9 aa, Homo sapiens
CLIEILASR

SEQ ID NO: 2284 - protein, 16 aa, Homo sapiens
NMTFDLPSDATVVLNR

SEQ ID NO: 2285 - protein, 13 aa, Homo sapiens
MVVPLACLLTPLK

SEQ ID NO: 2286 - protein, 16 aa, Homo sapiens
EAGNHTSGAGLVQINK

SEQ ID NO: 2287 - protein, 13 aa, Homo sapiens
VIEEFYNQTWVHR

SEQ ID NO: 2288 - protein, 11 aa, Homo sapiens
CKIPALDLLIK

SEQ ID NO: 2289 - protein, 11 aa, Homo sapiens
WCVLSTPEIQK

SEQ ID NO: 2290 - protein, 8 aa, Homo sapiens
TIIFCETK

SEQ ID NO: 2291 - protein, 14 aa, Homo sapiens
VPGNVTAVLGETLK

SEQ ID NO: 2292 - protein, 15 aa, Homo sapiens
GSVAIWSGKPPICEK

SEQ ID NO: 2293 - protein, 9 aa, Homo sapiens
LTCFELAPK

SEQ ID NO: 2294 - protein, 14 aa, Homo sapiens
VDLEDFENNTAYAK

SEQ ID NO: 2295 - protein, 9 aa, Homo sapiens
EQQFNSTYR

SEQ ID NO: 2296 - protein, 11 aa, Homo sapiens
GGDEYDNHCGK

SEQ ID NO: 2297 - protein, 15 aa, Homo sapiens
YLPDTLLLEECGLLR

SEQ ID NO: 2298 - protein, 11 aa, Homo sapiens
VLEAVNGTDAR

SEQ ID NO: 2299 - protein, 15 aa, Homo sapiens
LSAVNSIFLSHNNTK

SEQ ID NO: 2300 - protein, 9 aa, Homo sapiens
QELLCAFWK

SEQ ID NO: 2301 - protein, 11 aa, Homo sapiens
AALQEELQLCK

SEQ ID NO: 2302 - protein, 10 aa, Homo sapiens
CNEIINWLDK

SEQ ID NO: 2303 - protein, 28 aa, Homo sapiens
EGSRTDDEVVQREEEAIQLDGLNASQIR

SEQ ID NO: 2304 - protein, 17 aa, Homo sapiens
LQQDVLQFQKNQTNLER

SEQ ID NO: 2305 - protein, 16 aa, Homo sapiens
IIKPCNHVLSLSFPIR

SEQ ID NO: 2306 - protein, 20 aa, Homo sapiens
TLGTPEFVTATECVHYFEWR

SEQ ID NO: 2307 - protein, 15 aa, Homo sapiens
LAFATMFNSSEQSQK

SEQ ID NO: 2308 - protein, 15 aa, Homo sapiens
YELSLHPNLTSMTFR

SEQ ID NO: 2309 - protein, 10 aa, Homo sapiens
SKFDNLYGCR

SEQ ID NO: 2310 - protein, 23 aa, Homo sapiens
LHVGYLQPLVAVQVSFAPNNTGK

SEQ ID NO: 2311 - protein, 13 aa, Homo sapiens
WCGTTQNYDADQK

SEQ ID NO: 2312 - protein, 7 aa, Homo sapiens
LLSAACR

SEQ ID NO: 2313 - protein, 16 aa, Homo sapiens
QEAKENGTNLTFIGDK

SEQ ID NO: 2314 - protein, 15 aa, Homo sapiens
FVGTPEVNQTTLYQR

SEQ ID NO: 2315 - protein, 15 aa, Homo sapiens
VACITEQVLTLVNKR

SEQ ID NO: 2316 - protein, 13 aa, Homo sapiens
FCTGLTQIETLFK

SEQ ID NO: 2317 - protein, 26 aa, Homo sapiens
MTVGEKVFSSNGQSITFDAIQEACAR

SEQ ID NO: 2318 - protein, 10 aa, Homo sapiens
YVQNGTYTVK

SEQ ID NO: 2319 - protein, 18 aa, Homo sapiens
GLNIALVNGTTGAVLGQK

SEQ ID NO: 2320 - protein, 17 aa, Homo sapiens
YTGTRPSNLANNTILVK

SEQ ID NO: 2321 - protein, 14 aa, Homo sapiens
CTVFHGAQVEDAFR

SEQ ID NO: 2322 - protein, 18 aa, Homo sapiens
ACLDYPVTSVLPPASLCK

SEQ ID NO: 2323 - protein, 26 aa, Homo sapiens
ITPNNNGTYACFVSNLATGRNNSIVK

SEQ ID NO: 2324 - protein, 9 aa, Homo sapiens
TVVALCGQR

SEQ ID NO: 2325 - protein, 9 aa, Homo sapiens
IIFANVSVR

SEQ ID NO: 2326 - protein, 27 aa, Homo sapiens
SHCIAEVENDEMPADLPSLAADFVESK

SEQ ID NO: 2327 - protein, 15 aa, Homo sapiens
IDCFSEVPTSVFGEK

SEQ ID NO: 2328 - protein, 11 aa, Homo sapiens
DIIACGFDINK

SEQ ID NO: 2329 - protein, 27 aa, Homo sapiens
ICISGDSAGGNLAAALGQQFTQDASLK

SEQ ID NO: 2330 - protein, 27 aa, Homo sapiens
EKDANVVVVDWLPLAHQLYTDAVNNTR

SEQ ID NO: 2331 - protein, 6 aa, Homo sapiens
CFFLSK

SEQ ID NO: 2332 - protein, 10 aa, Homo sapiens
FINYNQTVSR

SEQ ID NO: 2333 - protein, 20 aa, Homo sapiens
MLNTSSLLEQLNEQFNWVSR

SEQ ID NO: 2334 - protein, 9 aa, Homo sapiens
CNSLSTLEK

SEQ ID NO: 2335 - protein, 19 aa, Homo sapiens
YFDFLSSYSAVNQGHCHPK

SEQ ID NO: 2336 - protein, 15 aa, Homo sapiens
GYYNQSEAGSHILQR

SEQ ID NO: 2337 - protein, 25 aa, Homo sapiens
SDSVILNVLYGPDAPTISPLNTSYR

SEQ ID NO: 2338 - protein, 19 aa, Homo sapiens
TTLVDNNTWNNSHIALVGK

SEQ ID NO: 2339 - protein, 9 aa, Homo sapiens
VPLDVACAR

SEQ ID NO: 2340 - protein, 20 aa, Homo sapiens
LGQAPANWYNDTYPLSPPQR

SEQ ID NO: 2341 - protein, 14 aa, Homo sapiens
IAILTCPFEPPKPK

SEQ ID NO: 2342 - protein, 15 aa, Homo sapiens
QCRCMSVNLSDSDKQ

SEQ ID NO: 2343 - protein, 16 aa, Homo sapiens
NFEATLGWLQEHACSR

SEQ ID NO: 2344 - protein, 22 aa, Homo sapiens
TGGAYGEDLGADYNLSQVCDGK

SEQ ID NO: 2345 - protein, 19 aa, Homo sapiens
HNIIPIFAVTNYSYSYYEK

SEQ ID NO: 2346 - protein, 13 aa, Homo sapiens
LTDQLPLIIVCDR

SEQ ID NO: 2347 - protein, 23 aa, Homo sapiens
VTVPGNYYQLMCGLCGNYNGDPK

SEQ ID NO: 2348 - protein, 16 aa, Homo sapiens
RPPSAFFLFCSEYRPK

SEQ ID NO: 2349 - protein, 12 aa, Homo sapiens
LWNSTFLEEYSK

SEQ ID NO: 2350 - protein, 14 aa, Homo sapiens
CPFGGAFALAAGLR

SEQ ID NO: 2351 - protein, 11 aa, Homo sapiens
AVIFCLSADKK

SEQ ID NO: 2352 - protein, 11 aa, Homo sapiens
VGAPLVCCEIK

SEQ ID NO: 2353 - protein, 26 aa, Homo sapiens
RSDSVILNVLYGPDAPTISPLNTSYR

SEQ ID NO: 2354 - protein, 24 aa, Homo sapiens
LNCQVIGASVDSHFCHLAWVNTPK

SEQ ID NO: 2355 - protein, 12 aa, Homo sapiens
SPVTTLLECMHK

SEQ ID NO: 2356 - protein, 14 aa, Homo sapiens
LANLTQGEDQYYLR

SEQ ID NO: 2357 - protein, 21 aa, Homo sapiens
VWDTAVGLNHTAEPSLQTLER

SEQ ID NO: 2358 - protein, 17 aa, Homo sapiens
IAVQFGPGFSWIANFTK

SEQ ID NO: 2359 - protein, 18 aa, Homo sapiens
LNETHIFNGSNWIMLIYK

SEQ ID NO: 2360 - protein, 34 aa, Homo sapiens
VAEVWLDEYKELFYGHGDHLIDQGLDVGNLTQQR

SEQ ID NO: 2361 - protein, 29 aa, Homo sapiens
EGSTHNWQHITDQIGMFCFTGLKPEQVER

SEQ ID NO: 2362 - protein, 23 aa, Homo sapiens
LPNSTIYVVEPGYLGFTVHPGDR

SEQ ID NO: 2363 - protein, 10 aa, Homo sapiens
YNLSEVLQGK

SEQ ID NO: 2364 - protein, 19 aa, Homo sapiens
EACPELDYFVVFSSVSCGR

SEQ ID NO: 2365 - protein, 9 aa, Homo sapiens
CNELQDIEK

SEQ ID NO: 2366 - protein, 26 aa, Homo sapiens
TLTLFNVTRNDTASYKCETQNPVSAR

SEQ ID NO: 2367 - protein, 18 aa, Homo sapiens
FVFPFDYLPAEQLCIVAK

SEQ ID NO: 2368 - protein, 8 aa, Homo sapiens
NISQVLEK

SEQ ID NO: 2369 - protein, 14 aa, Homo sapiens
SCYLSSLDLLLEHR

SEQ ID NO: 2370 - protein, 38 aa, Homo sapiens
TILPAAAQDVYYRDEIGNVSTSHLLILDDSVEMEIRPR

SEQ ID NO: 2371 - protein, 22 aa, Homo sapiens
SLGSGGSVSQLFSNFTGSVDDR

SEQ ID NO: 2372 - protein, 19 aa, Homo sapiens
LPVVIGGLLDVDCSEDVIK

SEQ ID NO: 2373 - protein, 14 aa, Homo sapiens
GHYNNVSCAVFHPR

SEQ ID NO: 2374 - protein, 11 aa, Homo sapiens
GLSSLLCNFTK

SEQ ID NO: 2375 - protein, 9 aa, Homo sapiens
TCFETFPDK

SEQ ID NO: 2376 - protein, 13 aa, Homo sapiens
SLCLGPALIHTAK

SEQ ID NO: 2377 - protein, 12 aa, Homo sapiens
AYLEGTCVEWLR

SEQ ID NO: 2378 - protein, 15 aa, Homo sapiens
LLLCGGAPLSATTQR

SEQ ID NO: 2379 - protein, 17 aa, Homo sapiens
VNCETSCVQQPPCFPLK

SEQ ID NO: 2380 - protein, 22 aa, Homo sapiens
DGTVLCELINALYPEGQAPVKK

SEQ ID NO: 2381 - protein, 25 aa, Homo sapiens
SINTEVVACSVDSQFTHLAWINTPR

SEQ ID NO: 2382 - protein, 11 aa, Homo sapiens
CIPPSYADLGK

SEQ ID NO: 2383 - protein, 12 aa, Homo sapiens
YICENQDSISSK

SEQ ID NO: 2384 - protein, 15 aa, Homo sapiens
LNPTVTYGNDSFSAK

SEQ ID NO: 2385 - protein, 10 aa, Homo sapiens
TSAVPSPCGK

SEQ ID NO: 2386 - protein, 13 aa, Homo sapiens
NNDLCYWVPELVR

SEQ ID NO: 2387 - protein, 15 aa, Homo sapiens
DLGPTLANSTHHNVR

SEQ ID NO: 2388 - protein, 31 aa, Homo sapiens
RGDDLYTNVTISLVESLVGFEMDITHLDGHK

SEQ ID NO: 2389 - protein, 17 aa, Homo sapiens
YTCHVQHEGLPKPLTLR

SEQ ID NO: 2390 - protein, 14 aa, Homo sapiens
VACITEQVLTLVNK

SEQ ID NO: 2391 - protein, 19 aa, Homo sapiens
VFIMDNCEELIPEYLNFIR

SEQ ID NO: 2392 - protein, 18 aa, Homo sapiens
APKPVEMVENSTDPHPIK

SEQ ID NO: 2393 - protein, 26 aa, Homo sapiens
ILASLDFAQNFITNNTSSVIIEETKK

SEQ ID NO: 2394 - protein, 24 aa, Homo sapiens
TDDEVVQREEEAIQLDGLNASQIR

SEQ ID NO: 2395 - protein, 28 aa, Homo sapiens
VPSENKDLYEYSWVQGPLHSNETDRLPR

SEQ ID NO: 2396 - protein, 24 aa, Homo sapiens
YSVQLMSFVYNLSDTHLFPNASSK

SEQ ID NO: 2397 - protein, 7 aa, Homo sapiens
CALGVFR

SEQ ID NO: 2398 - protein, 28 aa, Homo sapiens
VAEAVSSPAGVGVTWLEPDYQVYLNASK

SEQ ID NO: 2399 - protein, 9 aa, Homo sapiens
TLTLFNVTR

SEQ ID NO: 2400 - protein, 28 aa, Homo sapiens
ETIYPNGTLLIQNVTHNDAGIYTLHVIK

SEQ ID NO: 2401 - protein, 6 aa, Homo sapiens
SPFLCR

SEQ ID NO: 2402 - protein, 20 aa, Homo sapiens
ANLSQVADHLDHIKEVAGAR

SEQ ID NO: 2403 - protein, 20 aa, Homo sapiens
NLALCPANHAPLQEAAVIPR

SEQ ID NO: 2404 - protein, 10 aa, Homo sapiens
CPFTGNVSIR

SEQ ID NO: 2405 - protein, 23 aa, Homo sapiens
CKDDEFTHLYTLIVRPDNTYEVK

SEQ ID NO: 2406 - protein, 14 aa, Homo sapiens
VDIQTEDLEDGTCK

SEQ ID NO: 2407 - protein, 10 aa, Homo sapiens
ASCLYGQLPK

SEQ ID NO: 2408 - protein, 11 aa, Homo sapiens
DNSTLAVDIYK

SEQ ID NO: 2409 - protein, 9 aa, Homo sapiens
CATITPDEK

SEQ ID NO: 2410 - protein, 14 aa, Homo sapiens
SRLWNSTFLEEYSK

SEQ ID NO: 2411 - protein, 8 aa, Homo sapiens
FCPEADSK

SEQ ID NO: 2412 - protein, 18 aa, Homo sapiens
QDTPQYNLTIEVSDKDFK

SEQ ID NO: 2413 - protein, 21 aa, Homo sapiens
IAPNTPQLADIVATGFSVCGR

SEQ ID NO: 2414 - protein, 17 aa, Homo sapiens
LQLSNDNRTLTLLSVTR

SEQ ID NO: 2415 - protein, 9 aa, Homo sapiens
GCILTLVER

SEQ ID NO: 2416 - protein, 16 aa, Homo sapiens
YLEGTSCIAGVLVPAK

SEQ ID NO: 2417 - protein, 22 aa, Homo sapiens
VDLGTLRGYYNQSEAGSHTVQR

SEQ ID NO: 2418 - protein, 14 aa, Homo sapiens
ELGSECGIEFDEEK

SEQ ID NO: 2419 - protein, 16 aa, Homo sapiens
AIPTIVSDGNTTFQEK

SEQ ID NO: 2420 - protein, 31 aa, Homo sapiens
IGPALSCGNTVVVKPAEQTPLTALHVASLIK

SEQ ID NO: 2421 - protein, 19 aa, Homo sapiens
VASVININPNTTHSTGSCR

SEQ ID NO: 2422 - protein, 19 aa, Homo sapiens
IWCFGPDGTGPNILTDITK

SEQ ID NO: 2423 - protein, 16 aa, Homo sapiens
WLFGGGTKVTVLGQPK

SEQ ID NO: 2424 - protein, 22 aa, Homo sapiens
VTQNLTLIEESLTSEFIHDIDR

SEQ ID NO: 2425 - protein, 14 aa, Homo sapiens
ELGDNVSMILVPFK

SEQ ID NO: 2426 - protein, 13 aa, Homo sapiens
LNWTSLLPASFTK

SEQ ID NO: 2427 - protein, 19 aa, Homo sapiens
TALWVATDHNMDNTSTVLR

SEQ ID NO: 2428 - protein, 28 aa, Homo sapiens
EIIYPNASLLIQNIIQNDTGFYTLHVIK

SEQ ID NO: 2429 - protein, 15 aa, Homo sapiens
INATDADEPNTLNSK

SEQ ID NO: 2430 - protein, 15 aa, Homo sapiens
VQWEKNTTSVWYTSK

SEQ ID NO: 2431 - protein, 19 aa, Homo sapiens
VANLTEPVVLTFQHQLQPK

SEQ ID NO: 2432 - protein, 8 aa, Homo sapiens
IISANGCK

SEQ ID NO: 2433 - protein, 17 aa, Homo sapiens
LGLLCQTVSQVVNAKEK

SEQ ID NO: 2434 - protein, 11 aa, Homo sapiens
DAGVVCTNETR

SEQ ID NO: 2435 - protein, 25 aa, Homo sapiens
GTEVNTTVIGENDPIDEVQGFLFGK

SEQ ID NO: 2436 - protein, 22 aa, Homo sapiens
TMVFPVMYLNESVHIDKETASR

SEQ ID NO: 2437 - protein, 16 aa, Homo sapiens
AAGGAVCEQPLGLECR

SEQ ID NO: 2438 - protein, 28 aa, Homo sapiens
TTPPSVYPLAPGSAAQTNSMVTLGCLVK

SEQ ID NO: 2439 - protein, 18 aa, Homo sapiens
VAHALAEGLGVIACIGEK

SEQ ID NO: 2440 - protein, 19 aa, Homo sapiens
LLEAQACTGGIIDPSTGER

SEQ ID NO: 2441 - protein, 8 aa, Homo sapiens
LSIQCYLR

SEQ ID NO: 2442 - protein, 8 aa, Homo sapiens
VCLDIIYK

SEQ ID NO: 2443 - protein, 20 aa, Homo sapiens
CMALAQLLVEQNFPAIAIHR

SEQ ID NO: 2444 - protein, 11 aa, Homo sapiens
GCPPDDIENPR

SEQ ID NO: 2445 - protein, 9 aa, Homo sapiens
FNGSVSFFR

SEQ ID NO: 2446 - protein, 10 aa, Homo sapiens
LFQNCSELFK

SEQ ID NO: 2447 - protein, 16 aa, Homo sapiens
LSALDNLLNHSSMFLK

SEQ ID NO: 2448 - protein, 20 aa, Homo sapiens
SGPKNMTFDLPSDATVVLNR

SEQ ID NO: 2449 - protein, 16 aa, Homo sapiens
TLTLFNVTRNDTASYK

SEQ ID NO: 2450 - protein, 9 aa, Homo sapiens
WSTAVEFCK

SEQ ID NO: 2451 - protein, 7 aa, Homo sapiens
FIVCLNK

SEQ ID NO: 2452 - protein, 29 aa, Homo sapiens
DSGIWINGFDYTGISHITPHIPEINDSIR

SEQ ID NO: 2453 - protein, 15 aa, Homo sapiens
ENATVPENEEEIIRK

SEQ ID NO: 2454 - protein, 18 aa, Homo sapiens
ANIQFGDNGTTISAVSNK

SEQ ID NO: 2455 - protein, 25 aa, Homo sapiens
GVLTNPNCEFEANYVAIHTLATWYK

SEQ ID NO: 2456 - protein, 23 aa, Homo sapiens
ITAQSIEELCAVNLYGPDAQVDR

SEQ ID NO: 2457 - protein, 27 aa, Homo sapiens
EVKGDLENAFLNLVQCIQNKPLYFADR

SEQ ID NO: 2458 - protein, 19 aa, Homo sapiens
NVGCLQEALQLATSFAQLR

SEQ ID NO: 2459 - protein, 34 aa, Homo sapiens
IQNILSEKPTVTTVYANNGSVLQGSSVASVYDGK

SEQ ID NO: 2460 - protein, 21 aa, Homo sapiens
VLGFKPKPPKNESLETYPVMK

SEQ ID NO: 2461 - protein, 17 aa, Homo sapiens
CPFGALSIVNLPSNLEK

SEQ ID NO: 2462 - protein, 17 aa, Homo sapiens
IAPASNVSHTVVLRPLK

SEQ ID NO: 2463 - protein, 10 aa, Homo sapiens
TFYSCTTEGR

SEQ ID NO: 2464 - protein, 17 aa, Homo sapiens
QAAPCVLFFDELDSIAK

SEQ ID NO: 2465 - protein, 8 aa, Homo sapiens
GIFPVLCK

SEQ ID NO: 2466 - protein, 16 aa, Homo sapiens
LSLDGQNIYNACCTLR

SEQ ID NO: 2467 - protein, 33 aa, Homo sapiens
VVRPDSELGERPPEDNQSFQYDHEAFLGKEDSK

SEQ ID NO: 2468 - protein, 20 aa, Homo sapiens
VHSPSGALEECYVTEIDQDK

SEQ ID NO: 2469 - protein, 16 aa, Homo sapiens
DIPFSAIYFPCYAHVK

SEQ ID NO: 2470 - protein, 19 aa, Homo sapiens
TPEVTCVVVDVSHEDPQVK

SEQ ID NO: 2471 - protein, 35 aa, Homo sapiens
LADDVDLEQVANETHGHVGADLAALCSEAALQAIR

SEQ ID NO: 2472 - protein, 24 aa, Homo sapiens
FIQENIFGICPHMTEDNKDLIQGK

SEQ ID NO: 2473 - protein, 15 aa, Homo sapiens
ARLNWTSLLPASFTK

SEQ ID NO: 2474 - protein, 13 aa, Homo sapiens
DLSYCLSGMYDHR

SEQ ID NO: 2475 - protein, 17 aa, Homo sapiens
SLGTIQQCCDAIDHLCR

SEQ ID NO: 2476 - protein, 22 aa, Homo sapiens
TPQICVVGSGPAGFYTAQHLLK

SEQ ID NO: 2477 - protein, 19 aa, Homo sapiens
YSDESGNMDFDNFISCLVR

SEQ ID NO: 2478 - protein, 19 aa, Homo sapiens
CVFELPAENDKPHDVEINK

SEQ ID NO: 2479 - protein, 18 aa, Homo sapiens
LLLAGYDDFNCNVWDALK

SEQ ID NO: 2480 - protein, 18 aa, Homo sapiens
VINETWAWKNATLAEQAK

SEQ ID NO: 2481 - protein, 13 aa, Homo sapiens
HEQNIDCGGGYVK

SEQ ID NO: 2482 - protein, 16 aa, Homo sapiens
VLQEALCVISGVPGLK

SEQ ID NO: 2483 - protein, 19 aa, Homo sapiens
LDLPNRPETSFLWFTNPCK

SEQ ID NO: 2484 - protein, 22 aa, Homo sapiens
LSLLEEPGNGTFTVILNQLTSR

SEQ ID NO: 2485 - protein, 7 aa, Homo sapiens
LISLICR

SEQ ID NO: 2486 - protein, 17 aa, Homo sapiens
IEGDMIVCAAYAHELPK

SEQ ID NO: 2487 - protein, 15 aa, Homo sapiens
NTCQLYIQTDHLFFK

SEQ ID NO: 2488 - protein, 11 aa, Homo sapiens
AKGETAYLPCK

SEQ ID NO: 2489 - protein, 7 aa, Homo sapiens
IFQALCK

SEQ ID NO: 2490 - protein, 11 aa, Homo sapiens
AAGPLLTDECR

SEQ ID NO: 2491 - protein, 19 aa, Homo sapiens
GVTIIGPATVGGIKPGCFK

SEQ ID NO: 2492 - protein, 17 aa, Homo sapiens
IVQIPFCGEIDCEDWIK

SEQ ID NO: 2493 - protein, 14 aa, Homo sapiens
AGPNGTLFVADAYK

SEQ ID NO: 2494 - protein, 21 aa, Homo sapiens
GITNLCVIGGDGSLTGANLFR

SEQ ID NO: 2495 - protein, 6 aa, Homo sapiens
TDSTCR

SEQ ID NO: 2496 - protein, 13 aa, Homo sapiens
GIFGFTDSDCIGK

SEQ ID NO: 2497 - protein, 14 aa, Homo sapiens
LQCYNCPNPTADCK

SEQ ID NO: 2498 - protein, 12 aa, Homo sapiens
LVQLFPNDTSLK

SEQ ID NO: 2499 - protein, 17 aa, Homo sapiens
CFIEEIPDETMVIGNYR

SEQ ID NO: 2500 - protein, 25 aa, Homo sapiens
SNWEAGNTFTCSVLHEGLHNHHTEK

SEQ ID NO: 2501 - protein, 20 aa, Homo sapiens
LQDERANLTTLAGTHTNIPK

SEQ ID NO: 2502 - protein, 12 aa, Homo sapiens
NILPNITTTYLK

SEQ ID NO: 2503 - protein, 28 aa, Homo sapiens
GPHFTFSLGSGSLQNDWEVSKINGTHAR

SEQ ID NO: 2504 - protein, 12 aa, Homo sapiens
ELYNGTADITLR

SEQ ID NO: 2505 - protein, 10 aa, Homo sapiens
SAEFFNYTVR

SEQ ID NO: 2506 - protein, 13 aa, Homo sapiens
LNNISIIGPLDMK

SEQ ID NO: 2507 - protein, 17 aa, Homo sapiens
HLNEIDLFHCIDPNDSK

SEQ ID NO: 2508 - protein, 18 aa, Homo sapiens
GCVLDVCMGGGDHDILCK

SEQ ID NO: 2509 - protein, 16 aa, Homo sapiens
CFNTLTNSFQPSLLGR

SEQ ID NO: 2510 - protein, 9 aa, Homo sapiens
VINETWAWK

SEQ ID NO: 2511 - protein, 9 aa, Homo sapiens
LPSCSADPR

SEQ ID NO: 2512 - protein, 21 aa, Homo sapiens
IYSNHSALESLALIPLQAPLK

SEQ ID NO: 2513 - protein, 20 aa, Homo sapiens
VFPYISVMVNNGSLSYDHSK

SEQ ID NO: 2514 - protein, 8 aa, Homo sapiens
YCAGWADK

SEQ ID NO: 2515 - protein, 8 aa, Homo sapiens
EMVECFNK

SEQ ID NO: 2516 - protein, 15 aa, Homo sapiens
SFDDHFQHLLNDSER

SEQ ID NO: 2517 - protein, 15 aa, Homo sapiens
NVTHLLQQELTEAQK

SEQ ID NO: 2518 - protein, 11 aa, Homo sapiens
IVDVNLTSEGK

SEQ ID NO: 2519 - protein, 23 aa, Homo sapiens
ADDKFVNVTIVTILAETTSDNEK

SEQ ID NO: 2520 - protein, 20 aa, Homo sapiens
ITQAVLGAHDGGVFGLCALR

SEQ ID NO: 2521 - protein, 18 aa, Homo sapiens
LWLPVNLTWADLEDRDGR

SEQ ID NO: 2522 - protein, 22 aa, Homo sapiens
FSVICPAVLQQLNFHPCEDRPK

SEQ ID NO: 2523 - protein, 8 aa, Homo sapiens
LTDCVVMR

SEQ ID NO: 2524 - protein, 35 aa, Homo sapiens
LGVHPLSCHGWVLGEHGDSSVPVWSGMNVAGVSLK

SEQ ID NO: 2525 - protein, 16 aa, Homo sapiens
TILVDNNTWNNTHISR

SEQ ID NO: 2526 - protein, 9 aa, Homo sapiens
GSDFDCELR

SEQ ID NO: 2527 - protein, 17 aa, Homo sapiens
LQLSNGNMTLTLLSVKR

SEQ ID NO: 2528 - protein, 14 aa, Homo sapiens
VDKDCAYCTDEMFR

SEQ ID NO: 2529 - protein, 17 aa, Homo sapiens
LIEGLSHEVIVSAACGR

SEQ ID NO: 2530 - protein, 14 aa, Homo sapiens
FTPYVGPIIPCILK

SEQ ID NO: 2531 - protein, 19 aa, Homo sapiens
SSCGKENTSDPSLVIAFGR

SEQ ID NO: 2532 - protein, 13 aa, Homo sapiens
VIECSYTSADGQR

SEQ ID NO: 2533 - protein, 30 aa, Homo sapiens
DCFIIYQGHHGDVGAPIADVILPGAAYTEK

SEQ ID NO: 2534 - protein, 35 aa, Homo sapiens
GHEVEDVDLELFNTSVQLQPPTTAPGPETAAFIER

SEQ ID NO: 2535 - protein, 23 aa, Homo sapiens
LPIQDILSAFSVYVNNTESYIHR

SEQ ID NO: 2536 - protein, 17 aa, Homo sapiens
LQLSNGNRTLTLFNVTR

SEQ ID NO: 2537 - protein, 10 aa, Homo sapiens
EGVVECSFVK

SEQ ID NO: 2538 - protein, 8 aa, Homo sapiens
AQCPIVER

SEQ ID NO: 2539 - protein, 13 aa, Homo sapiens
KQNNGAFNETLFR

SEQ ID NO: 2540 - protein, 10 aa, Homo sapiens
YHVLHINTTK

SEQ ID NO: 2541 - protein, 18 aa, Homo sapiens
DAVRNLTEVVPQLLDQLR

SEQ ID NO: 2542 - protein, 21 aa, Homo sapiens
DGTVLCELINALYPEGQAPVK

SEQ ID NO: 2543 - protein, 25 aa, Homo sapiens
GLPFTATAEEVVAFFGQHCPITGGK

SEQ ID NO: 2544 - protein, 14 aa, Homo sapiens
MIENGSLSFLPTLR

SEQ ID NO: 2545 - protein, 20 aa, Homo sapiens
YLQPLLAVQFTNLTMDTEIR

SEQ ID NO: 2546 - protein, 20 aa, Homo sapiens
FKLEWLGNCSGLNDETYGYK

SEQ ID NO: 2547 - protein, 18 aa, Homo sapiens
IQCSVSALNQGQVWIGGR

SEQ ID NO: 2548 - protein, 35 aa, Homo sapiens
IAENYTAVVSPDIASIDLNTFEFNKPSPYGSNHNR

SEQ ID NO: 2549 - protein, 11 aa, Homo sapiens
LECGGGPWGNK

SEQ ID NO: 2550 - protein, 14 aa, Homo sapiens
HMAAASAECQNYAK

SEQ ID NO: 2551 - protein, 11 aa, Homo sapiens
YLLDSCAPLLR

SEQ ID NO: 2552 - protein, 13 aa, Homo sapiens
KVEELQACVETAR

SEQ ID NO: 2553 - protein, 13 aa, Homo sapiens
HMNLILCDCDEFR

SEQ ID NO: 2554 - protein, 13 aa, Homo sapiens
SLLINAVEASCIR

SEQ ID NO: 2555 - protein, 14 aa, Homo sapiens
CITDTLQELVNQSK

SEQ ID NO: 2556 - protein, 18 aa, Homo sapiens
RPTEICADPQFIIGGATR

SEQ ID NO: 2557 - protein, 15 aa, Homo sapiens
TFVDFFSQCLHEEYR

SEQ ID NO: 2558 - protein, 13 aa, Homo sapiens
IEEFLEEVLCPPK

SEQ ID NO: 2559 - protein, 15 aa, Homo sapiens
LPFCAMGVSSVIHPK

SEQ ID NO: 2560 - protein, 10 aa, Homo sapiens
LSSFDPCFYR

SEQ ID NO: 2561 - protein, 10 aa, Homo sapiens
HANWTLTPLK

SEQ ID NO: 2562 - protein, 40 aa, Homo sapiens
SYLGDGPLQHYIAVSSPTNTTYVVQYALANLTGTVVNLTR

SEQ ID NO: 2563 - protein, 14 aa, Homo sapiens
IECDDKGDGSCDVR

SEQ ID NO: 2564 - protein, 17 aa, Homo sapiens
AIVDCIISIIEENSESK

SEQ ID NO: 2565 - protein, 18 aa, Homo sapiens
ELLNPVVEFVSHPSTTCR

SEQ ID NO: 2566 - protein, 17 aa, Homo sapiens
YYGGAEVVDEIELLCQR

SEQ ID NO: 2567 - protein, 10 aa, Homo sapiens
VTCVVVDISK

SEQ ID NO: 2568 - protein, 22 aa, Homo sapiens
TETGQELECLQDHLDDLVVECR

SEQ ID NO: 2569 - protein, 16 aa, Homo sapiens
STSSFPCPAGHFNGFR

SEQ ID NO: 2570 - protein, 23 aa, Homo sapiens
FITSILYENNVITIDLVQNSSQK

SEQ ID NO: 2571 - protein, 12 aa, Homo sapiens
KWGHNITEFQQR

SEQ ID NO: 2572 - protein, 11 aa, Homo sapiens
QTLQNASETVK

SEQ ID NO: 2573 - protein, 14 aa, Homo sapiens
DMSDGFISNLTIQR

SEQ ID NO: 2574 - protein, 16 aa, Homo sapiens
TLNSSGLPFGSYTFEK

SEQ ID NO: 2575 - protein, 11 aa, Homo sapiens
MYACDVGPDGR

SEQ ID NO: 2576 - protein, 19 aa, Homo sapiens
EEFCGLLSSPTGPLSSCHK

SEQ ID NO: 2577 - protein, 16 aa, Homo sapiens
GVGTDEACLIEILASR

SEQ ID NO: 2578 - protein, 16 aa, Homo sapiens
AINEFYLKSSDLEQLR

SEQ ID NO: 2579 - protein, 13 aa, Homo sapiens
FIITALPTIYHCK

SEQ ID NO: 2580 - protein, 18 aa, Homo sapiens
NSGLYTCQANNSASGHSR

SEQ ID NO: 2581 - protein, 14 aa, Homo sapiens
ANLSQVADHLDHIK

SEQ ID NO: 2582 - protein, 13 aa, Homo sapiens
WFFKNQSLPSSER

SEQ ID NO: 2583 - protein, 18 aa, Homo sapiens
ILLDQVEEAVADFDECIR

SEQ ID NO: 2584 - protein, 13 aa, Homo sapiens
ICLEDNVLMSGVK

SEQ ID NO: 2585 - protein, 11 aa, Homo sapiens
NMSVHLSPCFR

SEQ ID NO: 2586 - protein, 13 aa, Homo sapiens
NILEESLCELVAK

SEQ ID NO: 2587 - protein, 15 aa, Homo sapiens
SASLCAATLAAVLQR

SEQ ID NO: 2588 - protein, 13 aa, Homo sapiens
AALEALGSCLNNK

SEQ ID NO: 2589 - protein, 18 aa, Homo sapiens
FIQENIFGICPHMTEDNK

SEQ ID NO: 2590 - protein, 23 aa, Homo sapiens
IETVLPAEFFEVLSSSQNGSYHR

SEQ ID NO: 2591 - protein, 19 aa, Homo sapiens
KQDTPQYNLTIEVSDKDFK

SEQ ID NO: 2592 - protein, 12 aa, Homo sapiens
VDCTANTNTCNK

SEQ ID NO: 2593 - protein, 16 aa, Homo sapiens
NMSFVNDLTVTQDGRK

SEQ ID NO: 2594 - protein, 26 aa, Homo sapiens
GVVTDEQGIPIANATISVSGINHGVK

SEQ ID NO: 2595 - protein, 10 aa, Homo sapiens
NIYYLCAPNR

SEQ ID NO: 2596 - protein, 12 aa, Homo sapiens
FICEQDHQNFLR

SEQ ID NO: 2597 - protein, 13 aa, Homo sapiens
SQFEELCAELLQK

SEQ ID NO: 2598 - protein, 21 aa, Homo sapiens
LVSSPCCIVTSTYGWTANMER

SEQ ID NO: 2599 - protein, 38 aa, Homo sapiens
AGYFNFTSATITYLAQEDGPVVIGSTSAPGQGGILAQR

SEQ ID NO: 2600 - protein, 13 aa, Homo sapiens
QNCELFEQLGEYK

SEQ ID NO: 2601 - protein, 11 aa, Homo sapiens
YCAQDAFFQVK

SEQ ID NO: 2602 - protein, 13 aa, Homo sapiens
TIVYLDGSSQSCR

SEQ ID NO: 2603 - protein, 14 aa, Homo sapiens
LEEEQIILEDQNCK

SEQ ID NO: 2604 - protein, 12 aa, Homo sapiens
QNNGAFNETLFR

SEQ ID NO: 2605 - protein, 14 aa, Homo sapiens
VLFLLGADGGCITR

SEQ ID NO: 2606 - protein, 15 aa, Homo sapiens
LRPNFLAVCDPDWSR

SEQ ID NO: 2607 - protein, 9 aa, Homo sapiens
CIQTPPFLR

SEQ ID NO: 2608 - protein, 14 aa, Homo sapiens
GDSIDQCALIQSIK

SEQ ID NO: 2609 - protein, 14 aa, Homo sapiens
YSFCTDHTVLVQTR

SEQ ID NO: 2610 - protein, 11 aa, Homo sapiens
KPVVGQCTIER

SEQ ID NO: 2611 - protein, 15 aa, Homo sapiens
VWNSTFIEDYRDFDR

SEQ ID NO: 2612 - protein, 17 aa, Homo sapiens
LQGEGLSVAGIVCHVGK

SEQ ID NO: 2613 - protein, 21 aa, Homo sapiens
FNPNISWQPIPVHTVPITEDR

SEQ ID NO: 2614 - protein, 26 aa, Homo sapiens
ANLTNFPENGTFVVNIAQLSQDDSGR

SEQ ID NO: 2615 - protein, 13 aa, Homo sapiens
TVLENSTSYEEAK

SEQ ID NO: 2616 - protein, 12 aa, Homo sapiens
NCPHVVVGTPGR

SEQ ID NO: 2617 - protein, 25 aa, Homo sapiens
DVVTAAGDMLKDNATEEEILVYLEK

SEQ ID NO: 2618 - protein, 17 aa, Homo sapiens
NLEKNSTKQEILAALEK

SEQ ID NO: 2619 - protein, 13 aa, Homo sapiens
NCEPMIGLVPILK

SEQ ID NO: 2620 - protein, 25 aa, Homo sapiens
YPQDYQFYIQNFTALPLNTVVPPQR

SEQ ID NO: 2621 - protein, 22 aa, Homo sapiens
LCPGGQLPFLLYGTEVHTDTNK

SEQ ID NO: 2622 - protein, 12 aa, Homo sapiens
LSIPTYGLQCTR

SEQ ID NO: 2623 - protein, 11 aa, Homo sapiens
WTFSAQNASLR

SEQ ID NO: 2624 - protein, 28 aa, Homo sapiens
CPEALFQPSFLGMESCGIHETTFNSIMK

SEQ ID NO: 2625 - protein, 14 aa, Homo sapiens
LLQVVYLHSNNITK

SEQ ID NO: 2626 - protein, 20 aa, Homo sapiens
WVDPNSPVLLEDPVLCALAK

SEQ ID NO: 2627 - protein, 15 aa, Homo sapiens
DYYPINESLASLPLR

SEQ ID NO: 2628 - protein, 6 aa, Homo sapiens
AAPECK

SEQ ID NO: 2629 - protein, 11 aa, Homo sapiens
WGHNITEFQQR

SEQ ID NO: 2630 - protein, 14 aa, Homo sapiens
ACLISLGYDVENDR

SEQ ID NO: 2631 - protein, 17 aa, Homo sapiens
ACANPAAGSVILLENLR

SEQ ID NO: 2632 - protein, 19 aa, Homo sapiens
SDLQRPNPQSPFCVASSLK

SEQ ID NO: 2633 - protein, 9 aa, Homo sapiens
NCLALADDK

SEQ ID NO: 2634 - protein, 18 aa, Homo sapiens
LCEAICPAQAITIEAEPR

SEQ ID NO: 2635 - protein, 9 aa, Homo sapiens
ECPSVLEYK

SEQ ID NO: 2636 - protein, 14 aa, Homo sapiens
SLHDALCVLAQTVK

SEQ ID NO: 2637 - protein, 13 aa, Homo sapiens
HECQANGPEDLNR

SEQ ID NO: 2638 - protein, 12 aa, Homo sapiens
TIIPLISQCTPK

SEQ ID NO: 2639 - DNA, 31 bp, Homo sapiens
ggggacaagtttgtacaaaaaagcaggcttc

SEQ ID NO: 2640 - DNA, 29 bp, Homo sapiens
ggggaccactttgtacaagaaagctgggt
